(19) United States
(12) Patent Application Publication
(10) Pub. No.: US 2023/0348865 A1
(43) Pub. Date: Nov. 2, 2023

(54) ENGINEERED ENZYMES AND METHODS OF MAKING AND USING

(71) Applicant: Genomatica, Inc., San Diego, CA (US)

(72) Inventors: Amit Mahendra SHAH, San Diego, CA (US); Deqiang ZHANG, San Diego, CA (US); Joseph Roy WARNER, Oceanside, CA (US); Benjamin Matthew GRIFFIN, San Diego, CA (US); Russell Scott KOMOR, San Diego, CA (US); Harish NAGARAJAN, San Diego, CA (US); Sankha GHATAK, San Diego, CA (US); Toby Howard RICHARDSON, San Diego, CA (US)

(21) Appl. No.: 17/996,921

(22) PCT Filed: Apr. 23, 2021
(86) PCT No.: PCT/US2021/028768

§ 371 Date: Oct. 21, 2022

Related U.S. Application Data
(60) Provisional application No. 63/015,428, filed on Apr. 24, 2020.

(51) Int. Cl. C12N 9/02; C12P 13/00; C12P 7/04; C12N 15/52; C12N 9/10; C12N 9/88

(52) U.S. Cl. CPC C12N 9/0008; C12Y 102/0103; C12P 13/001; C12P 7/04; C12N 15/52; C12N 9/1029; C12Y 203/01174; C12Y 102/01003; C12N 9/88; C12Y 402/01017; C12N 9/1096

(57) ABSTRACT

The invention provides an engineered carboxylic acid reductase (CAR) enzyme, a nucleic acid encoding the CAR enzyme, and a non-naturally occurring microbial organism comprising an exogenous nucleic acid encoding the CAR, an engineered transaminase (TA) enzyme, and/or a hexamethylenediamine (HMD) transaminase (TA2) enzyme. The invention provides a non-naturally occurring microbial organism that has a 1,6-hexanediol (HDO) pathway with a HDO pathway enzyme expressed in sufficient amounts to produce 6 aminocaproate semi aldehyde, HDO, or both. The invention further provides a non-naturally occurring microbial organism that has an HMD pathway with a HMD pathway enzyme expressed in sufficient amounts to produce 6-aminocaproate semialdehyde, HMD, or both. The invention additionally provides bioderived HMD, 6-aminocaproate semialdehyde, and/or HDO and methods for producing bioderived HMD, 6-aminocaproate semialdehyde, and/or HDO.

### CROSS-REFERENCE TO RELATED APPLICATIONS

[0001] This application claims the benefit of U.S. Provisional Patent Application No. 63/015,428, filed Apr. 24, 2020, which is incorporated by reference herein in its entirety.

### SEQUENCE LISTING

[0002] This application incorporates by reference a Sequence Listing submitted with this application as an ASCII text file, entitled 12956-492-228_SEQ_LISTING.txt created on Apr. 20, 2021 and having a size of 1,773,544 bytes.

### BACKGROUND

[0003] Nylons are polyamides that can be synthesized by the condensation polymerization of a diamine with a dicarboxylic acid or the condensation polymerization of lactams. Nylon 6,6 is produced by reaction of hexamethylenediamine (HMD) and adipic acid, while nylon 6 is produced by a ring opening polymerization of caprolactam. Therefore, adipic acid, hexamethylenediamine, and caprolactam are important intermediates in nylon production.

[0004] Microorganisms have been engineered to produce some of the nylon intermediates. However, engineered microorganisms can produce undesirable byproducts as a result of undesired enzymatic activity on pathway intermediates and final products. Such byproducts and impurities therefore increase cost and complexity of biosynthesizing compounds and can decrease efficiency or yield of the desired products.

### SUMMARY

[0005] The invention provides an engineered carboxylic acid reductase (CAR) enzyme capable of (a) forming 6-aminocaproate semialdehyde from a 6-aminocaproic acid substrate, (b) forming 6-aminocaproate semialdehyde from a 6-aminocaproic acid substrate at a greater rate as compared to the wild type CAR, (c) having a higher affinity for a 6-aminocaproic acid substrate as compared to the wild type CAR, or any combination of (a), (b), and (c). The engineered CAR enzyme can comprise one or more amino acid alterations at one or more residue positions disclosed herein, for example at least one alteration of an amino acid of SEQ ID NO: 152, 153, or 254. Provided herein is an engineered CAR that has an activity that is at least 20% higher than the activity of the CAR of SEQ ID NO:152, 153 or 254.

[0006] The invention also provides the nucleic acid encoding the engineered CAR disclosed herein, which can be operatively linked to a promoter and can be in a vector.

[0007] The invention further provides a non-naturally occurring microbial organism comprising an exogenous nucleic acid encoding an engineered CAR disclosed herein, a CAR having an amino acid sequence having at least 50% sequence identity to a CAR disclosed herein, or hexamethylenediamine (TIMID) transaminase (TA2) enzyme having at least 50% sequence identity to a TA2 disclosed herein. In some aspects, the non-naturally occurring microbial organism further contains an exogenous nucleic acid encoding an engineered transaminase (TA) enzyme having a sequence disclosed herein, for example, a TA enzyme having one or more amino acid alterations at one or more positions selected from residues disclosed herein or having at least 50% sequence identity to at least 25 or more contiguous amino acids of any TA sequence disclosed herein. The exogenous nucleic acid can be heterologous or homolgous. The non-naturally occurring microbial organism can comprise a CAR variant, a TA2 variant, and/or a TA variant disclosed herein.

[0008] The invention provides a non-naturally occurring microbial organism of any one of claims comprising a hexamethylenediamine (HMD) pathway having a HMD pathway enzyme expressed in sufficient amounts to produce HMD. The HMD pathway comprises (1) 3-oxoadipyl-CoA thiolase, (2) hydroxyadipyl-CoA dehydrogenase (HBD), (3) crotonase, (4) trans-enoylCoA reductase (TER), (5) 6ACA-aldehyde dehydrogenase (6ACA-ALD), (6) 6ACA-transaminase (TA), (7) carboxylic acid reductase (CAR), and (8) HMD-transaminase (TA2). The non-naturally occurring microbial organism can further comprising one or more exogenous nucleic acids encoding a phosphopantetheinyl transferase HMD pathway enzyme. The exogenous nucleic acid can be a heterologous nucleic acid. In some aspects, the non-naturally occurring microbial organism is in a substantially anaerobic culture medium. The microbial organism can be a species of bacteria, yeast, or fungus. In some aspects, the non-naturally occurring microbial organism is capable of producing at least 10% more 6-aminocaproate semialdehyde, HMD or both compared to a control microbial organism that does not contain the exogenous nucleic acid. Further provided herein is a non-naturally occurring microbial organism that converts more: (a) adipate semialdehyde to 6-aminocaproic acid; (b) 6-aminocaproic acid to 6-aminocaproate semialdehyde, and/or (c) 6-aminocaproate semialdehyde to HMD, compared to a control microbial organism that does not contain the exogenous nucleic acid.

[0009] Provided herein is a non-naturally occurring microbial organism having an exogenous nucleic acid encoding an engineered CAR disclosed herein, or a CAR comprising an amino acid sequence having at least 50% sequence identity to at least 25 or more contiguous amino acids of the sequence of a CAR disclosed herein. The non-naturally occurring microbial organism can further contain an exogenous nucleic acid encoding (a) an engineered transaminase (TA) enzyme comprising at least one alteration of an amino acid of SEQ ID NOS:1, 13 or 31; (b) an engineered TA enzyme comprising one or more amino acid alterations at one or more positions selected from residues disclosed herein; (c) an engineered TA enzyme comprising at least one amino acid alteration of the engineered protein selected from an alteration disclosed herein and combinations thereof of SEQ ID NO:1, or (d) a transaminase comprising an amino acid sequence having at least 50% sequence identity to at least 25 or more contiguous amino acids of a sequence disclosed herein. The exogenous nucleic acid can be heterologous or homolgous. The non-naturally occurring microbial organism can contain a CAR having an amino acid sequence selected from the group consisting of CAR variants disclosed herein, and/or an engineered TA having an amino acid sequence of a TA variants disclosed herein. In some aspects, the non-naturally occurring microbial organism comprises a 1,6-hexanediol (HDO) pathway having a HDO pathway enzyme expressed in sufficient amounts to produce HDO, wherein said HDO pathway comprises (1) thiolase, (2) hydroxyadipyl-CoA dehydrogenase (HBD), (3) crotonase, (4) trans-enoylCoA reductase (TER), (5) 6ACA-aldehyde dehydrogenase (6ACA-ALD), (6) 6ACA-transaminase (TA), (7) carboxylic acid reductase (CAR), (8) 6-aminocaproate semialdehyde reductase, (9) 6-aminohexanol aminotransferase or oxidoreductase, and (10) 6-hydroxyhexanal reductase. The non-naturally occurring microbial organism can further contain one or more exogenous nucleic acids encoding a phosphopantetheinyl transferase HDO pathway enzyme. The exogenous nucleic acid can be a heterologous nucleic acid. In some aspects, the non-naturally occurring microbial organism is in a substantially anaerobic culture medium. The microbial organism can be a species of bacteria, yeast, or fungus. In some aspects, the non-naturally occurring microbial organism is capable of producing at least 10% more 6-aminocaproate semialdehyde, HDO or both compared to a control microbial organism that does not comprise the exogenous nucleic acid disclosed herein. The non-naturally occurring microbial organism provided herein converts more: (a) adipate semialdehyde to 6-aminocaproic acid, and/or (b) 6-aminocaproic acid to 6-aminocaproate semialdehyde compared to a control microbial organism that does not comprise the exogenous nucleic acid disclosed herein.

[0010] The invention further provides a method for producing hexamethylenediamine (HMD), comprising culturing the non-naturally occurring microbial organism disclosed herein under conditions and for a sufficient period of time to produce HMD. The invention also provides a method for producing 1,6-hexanediol (HDO), comprising culturing the non-naturally occurring microbial organism disclosed herein under conditions and for a sufficient period of time to produce HDO. In some aspects, the method further comprises separating the HMD or HDO from other components in the culture. The separating can comprise extraction, continuous liquid-liquid extraction, pervaporation, membrane filtration, membrane separation, reverse osmosis, electrodialysis, distillation, crystallization, centrifugation, extractive filtration, ion exchange chromatography, absorption chromatography, or ultrafiltration.

[0011] Provided herein is culture medium comprising bioderived HMD, 6-aminocaproate semialdehyde, and/or HDO that has a carbon-12, carbon-13 and carbon-14 isotope ratio that reflects an atmospheric carbon dioxide uptake source. In some aspects, the bioderived HMD, 6-aminocaproate semialdehyde, and/or HDO is produced by a non-naturally occurring microbial organism disclosed herein or a method disclosed herein. In some aspects, the culture medium comprises the engineered CAR, engineered TA enzyme, the engineered hexamethylenediamine (HMD) transaminase (TA2) enzyme, and/or the aldehyde dehydrogenase (ALD) enzyme disclosed herein. In some aspects, the culture medium contains a nucleic acid encoding the engineered CAR, engineered TA enzyme, the engineered TA2 enzyme, and/or the aldehyde dehydrogenase (ALD) enzyme disclosed herein. In some aspects, the culture medium contains a non-naturally occurring microbial organism disclosed herein. The culture medium can be separated from the non-naturally occurring microbial organism that produces bioderived HMD, 6-aminocaproate semialdehyde, and/or HDO.

[0012] Further provided herein is bioderived HMD, 6-aminocaproate semialdehyde, and/or HDO having a carbon-12, carbon-13 and carbon-14 isotope ratio that reflects an atmospheric carbon dioxide uptake source. In some aspects, the bioderived HMD, 6-aminocaproate semialdehyde, and/or HDO is produced by a non-naturally occurring microbial organism and/or a method disclosed herein. In some aspects, the bioderived HMD, 6-aminocaproate semialdehyde, and/or HDO has an Fm value of at least 80%, at least 85%, at least 90%, at least 95% or at least 98%. The invention also provides compositions contain the bioderived HMD, 6-aminocaproate semialdehyde, and/or HDO disclosed herein, and a compound other than the bioderived HMD, 6-aminocaproate semialdehyde, and/or HDO. The composition can contain a portion of the non-naturally occurring microbial organism disclosed herein or a cell lysate or culture supernatant.

### BRIEF DESCRIPTION OF THE DRAWINGS

[0013] FIG. 1 shows exemplary pathways from succinyl-CoA and acetyl-CoA to 6-aminocaproate, hexamethylenediamine (HMD), and caprolactam. The enzymes are designated as follows: A) 3-oxoadipyl-CoA thiolase, B) 3-oxoadipyl-CoA reductase, C) 3-hydroxyadipyl-CoA dehydratase, D) 5-carboxy-2-pentenoyl-CoA reductase, E) 3-oxoadipyl-CoA/acyl-CoA transferase, F) 3-oxoadipyl-CoA synthase, G) 3-oxoadipyl-CoA hydrolase, H) 3-oxoadipate reductase, I) 3-hydroxyadipate dehydratase, J) 5-carboxy-2-pentenoate reductase, K) adipyl-CoA/acyl-CoA transferase, L) adipyl-CoA synthase, M) adipyl-CoA hydrolase, N) adipyl-CoA reductase (aldehyde forming), O) 6-aminocaproate transaminase, P) 6-aminocaproate dehydrogenase, Q) 6-aminocaproyl-CoA/acyl-CoA transferase, R) 6-aminocaproyl-CoA synthase, S) amidohydrolase, T) spontaneous cyclization, U) 6-aminocaproyl-CoA reductase (aldehyde forming), V) HMD transaminase, W) HMD dehydrogenase, X) adipate reductase, Y) adipate kinase, Z) adipylphosphate reductase.

[0014] FIG. 2 is a graphical representation of the amino acid positions mutated in SEQ ID NO: 1.

[0015] FIG. 3 is a graphical representation of the activity of the variants relative to the wild-type SEQ ID NO: 1 control (SEQ ID NO: 1).

[0016] FIG. 4 shows an exemplary pathway for synthesis of 6-amino caproic acid and adipate using lysine as a starting point.

[0017] FIG. 5 shows an exemplary caprolactam synthesis pathway using adipyl-CoA as a starting point.

[0018] FIG. 6 shows exemplary pathways to 6-aminocaproate from pyruvate and succinic semialdehyde. Enzymes are A) HODH aldolase, B) OHED hydratase, C) OHED reductase, D) 2-OHD decarboxylase, E) adipate semialdehyde aminotransferase and/or adipate semialdehyde oxidoreductase (aminating), F) OHED decarboxylase, G) 6-OHE reductase, H) 2-OHD aminotransferase and/or 2-OHD oxidoreductase (aminating), I) 2-AHD decarboxylase, J) OHED aminotransferase and/or OHED oxidoreductase (aminating), K) 2-AHE reductase, L) HODH formate-lyase and/or HODH dehydrogenase, M) 3-hydroxyadipyl-CoA dehydratase, N) 2,3-dehydroadipyl-CoA reductase, O) adipyl-CoA dehydrogenase, P) OHED formate-lyase and/or OHED dehydrogenase, Q) 2-OHD formate-lyase and/or 2-OHD dehydrogenase. Abbreviations are: HODH=4-hydroxy-2-oxoheptane-1,7-dioate, OHED=2-oxohept-4-ene-1,7-dioate, 2-OHD=2-oxoheptane-1,7-dioate, 2-AHE=2-aminohept-4-ene-1,7-dioate, 2-AHD=2-aminoheptane-1,7-dioate, and 6-OHE=6-oxohex-4-enoate.

[0019] FIG. 7 shows exemplary pathways to hexamethylenediamine from 6-aminocapropate. Enzymes are A) 6-aminocaproate kinase, B) 6-AHOP oxidoreductase, C) 6-aminocaproic semialdehyde aminotransferase and/or 6-aminocaproic semialdehyde oxidoreductase (aminating), D) 6-aminocaproate N-acetyltransferase, E) 6-acetamidohexanoate kinase, F) 6-AAHOP oxidoreductase, G) 6-acetamidohexanal aminotransferase and/or 6-acetamidohexanal oxidoreductase (aminating), H) 6-acetamidohexanamine N-acetyltransferase and/or 6-acetamidohexanamine hydrolase (amide), I) 6-acetamidohexanoate CoA transferase and/or 6-acetamidohexanoate CoA ligase, J) 6-acetamidohexanoyl-CoA oxidoreductase, K) 6-AAHOP acyltransferase, L) 6-AHOP acyltransferase, M) 6-aminocaproate CoA transferase and/or 6-aminocaproate CoA ligase, N) 6-aminocaproyl-CoA oxidoreductase. Abbreviations are: 6-AAHOP=[(6-acetamidohexanoyl)oxy]phosphonate and 6-AHOP=[(6-aminohexanoyl)oxy]phosphonate.

[0020] FIG. 8 shows exemplary biosynthetic pathways leading to 1,6-hexanediol. A) is a 6-aminocaproyl-CoA transferase or synthetase catalyzing conversion of 6ACA to 6-aminocaproyl-CoA; B) is a 6-aminocaproyl-CoA reductase catalyzing conversion of 6-aminocaproyl-CoA to 6-aminocaproate semialdehyde; C) is a 6-aminocaproate semialdehyde reductase catalyzing conversion of 6-aminocaproate semialdehyde to 6-aminohexanol; D) is a 6-aminocaproate reductase catalyzing conversion of 6ACA to 6-aminocaproate semialdehyde; E) is an adipyl-CoA reductase adipyl-CoA to adipate semialdehyde; F) is an adipate semialdehyde reductase catalyzing conversion of adipate semialdehyde to 6-hydroxyhexanoate; G) is a 6-hydroxyhexanoyl-CoA transferase or synthetase catalyzing conversion of 6-hydroxyhexanoate to 6-hydroxyhexanoyl-CoA; H) is a 6-hydroxyhexanoyl-CoA reductase catalyzing conversion of 6-hydroxyhexanoyl-CoA to 6-hydroxyhexanal; I) is a 6-hydroxyhexanal reductase catalyzing conversion of 6-hydroxyhexanal to HDO; J) is a 6-aminohexanol aminotransferase or oxidoreductases catalyzing conversion of 6-aminohexanol to 6-hydroxyhexanal; K) is a 6-hydroxyhexanoate reductase catalyzing conversion of 6-hydroxyhexanoate to 6-hydroxyhexanal; L) is an adipate reductase catalyzing conversion of ADA to adipate semialdehyde; and M) is an adipyl-CoA transferase, hydrolase or synthase catalyzing conversion of adipyl-CoA to ADA.

[0021] FIG. 9 shows exemplary pathways from adipate or adipyl-CoA to caprolactone. Enzymes are A. adipyl-CoA reductase, B. adipate semialdehyde reductase, C. 6-hydroxyhexanoyl-CoA transferase or synthetase, D. 6-hydroxyhexanoyl-CoA cyclase or spontaneous cyclization, E. adipate reductase, F. adipyl-CoA transferase, synthetase or hydrolase, G. 6-hydroxyhexanoate cyclase, H. 6-hydroxyhexanoate kinase, I. 6-hydroxyhexanoyl phosphate cyclase or spontaneous cyclization, J. phosphotrans-6-hydroxyhexanoylase.

[0022] FIG. 10 shows an exemplary hexamethylenediamine (HMD) biosynthetic pathway. Starting from succinyl-CoA and acetyl-CoA the enzymes are designated as follows: (A) thiolase; (B) hydroxyadipyl-CoA dehydrogenase (HBD); (C) crotonase; (D) trans-enoyl-CoA reductase (Ter); (E) 6ACA-aldehyde dehydrogenase (ALD); (F) 6ACA-transaminase (TA); (G) CoA transferase/CoA ligase; (H) HMD-aldehyde dehydrogenase (ALD); (I) carboxylic acid reductase (CAR), and (J) HMD-transaminase (TA2). PPTase corresponds to a phosphopantetheinyl transferase.

[0023] FIG. 11 shows the enzymatic activities of the CAR homolog from Mycobacterium avium (SEQ ID NO:153) on four carbon substrates (butyrate, 4-hydroxybutyrate (4-HB, succinate and 4-aminobutyric acid (GABA)) and on six carbon substrates (hexanoate, 6-hydroxycaproic acid, adipate and 6ACA).

[0024] FIG. 12 shows the enzymatic activity of the CAR homolog from Mycobacterium avium (SEQ ID NO:153; Parent) compared to variant 1 shown in Table 9.

### DETAILED DESCRIPTION

[0025] Unless defined otherwise, all technical and scientific terms used herein have the same meaning as commonly understood by those of ordinary skill in the art to which embodiments of the invention belongs. Any methods, devices and materials similar or equivalent to those described herein can be used in the practice of embodiments of the invention. The following definitions are provided to facilitate understanding of certain terms used frequently herein and are not meant to limit the scope of the present disclosure. All documents (e. g. patent applications or patents) referred to herein are incorporated by reference in their entirety.

[0026] Described are aminotransferases, also known as transaminases (E. C. 2. 6. 1) that catalyze the transfer of an amino group, a pair of electrons, and a proton from a primary amine of an amino donor substrate to the carbonyl group of an amino acceptor molecule. The desired reaction of the transaminase is to transfer the amino group of glutamate or alanine to adipate semialdehyde to form 6-aminocaproic acid (6ACA), which is shown below:

Adipate semialdehyde+Glutamate→6ACA+alpha-ketoglutaric acid

[0027] However, transaminases also have specificity for succinate semialdehyde or pyruvate as shown below:

Succinate semialdehyde+glutamate→gamma-aminobutyric acid+alpha-ketoglutaric acid

Pyruvate+glutamate→alanine+alpha-ketoglutaric acid

[0028] Alanine may substitute for glutamate as the amine donor.

[0029] The described transaminase (TA) enzymes identified to be active on an adipate semialdehyde substrate to form 6-aminocaproic acid. This enzyme maybe used in various pathways leading to nylon intermediates.

[0030] The desired transaminases were identified by homology search as well as metagenomic discovery for the enzymes that can perform the desired reaction in the pathway to produce 6ACA. To evaluate the transaminase for adipate semialdehyde utilization, in some embodiments, the assay can be conducted in the forward or reverse direction with 6ACA or another candidate substrate as exemplified herein. The assay can be conducted by direct or indirect measurement of the enzymatic product using methods well known in the art. One exemplary method is an indirect method that is exemplified below and in the Examples.

[0031] In some embodiments, a transaminase enzyme from Achromobacter xylosoxidans encoded by SEQ ID NO: 1 was identified. To identify other TA enzymes, SEQ ID NO: 1 was used. Homologous enzymes were identified as set out in Table 6. In some embodiments, transaminase enzymes or sequences are identified by BLAST. In some embodiments, the transaminase shares at least about 40%, 45%, 50%, 55%, 60%, 65%, 70%, 75%, 80%, 85%, 90%, 95%, 96%, 97%, 98%, 99% or 100% sequence identity, to at least 25, 50, 75, 100, 150, 200, 250, 300 or more contiguous amino acids of the amino acid sequences of the transaminases of Table 6.

[0032] In some embodiments, the transaminases identified in Table 6 share at least about 40%, 45%, 50%, 55%, 60%, 65%, 70%, 75%, 80%, 85%, 90%, 95%, 96%, 97%, 98%, 99% or 100% sequence identity, to at least 25, 50, 75, 100, 150, 200, 250, 300 or more contiguous amino acids of the amino acid sequences of the transaminases of SEQ ID NO:1, 13 or 31.

[0033] In some embodiments, the transaminase enzyme has at least about 50% amino acid sequence identity to at least 25, 50, 75, 100, 150, 200, 250, 300, or more contiguous amino acids of any of SEQ ID NOs: 1, 3, 4, 5, 9, 12, 13, 26, 27, 30, 31, 38, 50, 52, 64, 74, 78, 79, 81, 91, 106, 108, and 116. In some embodiments the amino acid sequence of the transaminase enzyme that reacts with adipate semialdehyde to form 6ACA is selected from the amino acid sequences of SEQ ID NOS: 1, 3, 4, 5, 9, 12, 13, 26, 27, 30, 31, 38, 50, 52, 64, 74, 78, 79, 81, 91, 106, 108, and 116.

[0034] In some embodiments, the TA enzymes catalytic efficiency, and/or turnover number for adipate semialdehyde as the substrate is similar to when succinate semialdehyde is the substrate. In some embodiments the enzymes with catalytic efficiency, and/or turnover number for adipate semialdehyde as the substrate that is similar to when succinate semialdehyde share at least about 40%, 45%, 50%, 55%, 60%, 65%, 70%, 75%, 80%, 85%, 90%, 95%, 96%, 97%, 98%, 99% or 100% sequence identity, to at least 25, 50, 75, 100, 150, 200, 250, 300 or more contiguous amino acids of the amino acid sequences of the transaminase of SEQ ID NO: 1, 3, 4, 5, 9, 12, 13, 26, 27, 30, 31, 38, 50, 52, 64, 74, 78, 79, 81, 91, 106, 108, and 116.

[0035] As used with respect to any of the enzymes described herein, the term turnover number (also termed as k_{cat}) is defined as the maximum number of chemical conversions of substrate molecules per second that a single catalytic site will execute for a given enzyme concentration [E_{T}]. It can be calculated from the maximum reaction rate Vmax and catalyst site concentration [E_{T}] as follows:
[0036] Kcat=Vmax/[E_{T}]. The unit is s⁻¹.

[0037] As used with respect to any of the enzymes described herein, the term “catalytic efficiency” is a measure of how efficiently an enzyme converts substrates into products. A comparison of catalytic efficiencies can also be used as a measure of the preference of an enzyme for different substrates (i. e., substrate specificity). The higher the catalytic efficiency, the more the enzyme “prefers” that substrate. It can be calculated from the formula: k_{cat}/K_{M}, where k_{cat} is the turnover number and K_{M} is the Michaelis constant, K_{M} is the substrate concentration at which the reaction rate is half of Vmax. The unit of catalytic efficiency can be expressed as s⁻¹M⁻¹.

[0038] The transaminase enzymes identified are derived from very genetically diverse organisms. Shown below are the pairwise sequence alignments of some exemplary transaminases are shown Table 1.

TABLE 1

| | SEQ ID NO: 1 | SEQ ID NO: 13 | SEQ ID NO: 31 |
|---|---|---|---|
| SEQ ID NO: 1 | | 44% | 87% |
| SEQ ID NO: 13 | 44% | | 43% |
| SEQ ID NO: 31 | 87% | 43% | |

[0039] The transaminase enzymes have conserved domains. Based on the multiple sequence alignments and hidden Markov models (HMMs), the transaminase enzymes are grouped into Pfam PF00202, of the Pfam database from the European Bioinformatics Institute (pfam.xfam.org).

[0040] In some embodiments, amino acid positions were identified for mutation in SEQ ID NO:1 by examination of the crystal structure of the protein, and the gene encoding SEQ ID NO:1 was subjected to saturation mutagenesis at selected amino acid positions. Catalytically-relevant residues were identified that can be subject to change to provide a variant amino acid with activity better than the wild-type (unmodified) SEQ ID NO: 1.

[0041] In some embodiments, transaminase enzymes are engineered to have greater specificity for the adipate semialdehyde substrate than its corresponding wild-type.

[0042] As used herein “engineered” or “variant” when used in reference to any polypeptide or nucleic acid described here refers to a sequence having at least one variation or alteration at an amino acid position or nucleic acid position as compared to a parent sequence. The parent sequence can be, for example, an unmodified, wild-type sequence, a homolog thereof or a modified variant of, for example, a wild-type sequence or homolog thereof.

[0043] In some embodiments, the engineered transaminase has one or more alterations of an amino acid of SEQ ID NO; 1, SEQ ID NO: 13, or SEQ ID NO: 31. In some embodiments the engineered transaminase has alterations in amino acid sequences that have at least one, at least two, at least three, at least four, at least five, at least six, at least seven, or at least eight alterations of an amino acid with respect to SEQ ID NO:1 SEQ ID NO: 13 or SEQ ID NO: 31.

[0044] In some embodiments, the engineered TA has one or more amino acid alterations selected from one or more positions corresponding to residues V114, S136, T148, P153, I203, I204, P206, V207, V111, T216, A237, T264, M265 and L386, G19, C22, D70, R94, D99, T109, E112, A113, F137, G144, I149, K150, Y154, S178, L186, Q208, L234, T242, A315, K318, R338, G336, L386, V390, A406, S416, A421, or one or more combinations of the amino acid alterations and amino acid residue positions of SEQ ID NO:1.

[0045] In some embodiments, the one or more amino acid alteration of the engineered protein is a substitution of a conservative or non-conservative amino acid at one or more positions corresponding to residue V114, S136, T148, P153, I203, I204, P206, V207, V111, T216, A237, T264, M265 and L386, G19, C22, D70, R94, D99, T109, E112, A113, F137, G144, I149, K150, Y154, S178, L186, Q208, L234, T242, A315, K318, R338, G336, L386, V390, A406, S416, and A421 or one or more combinations of the amino acid alterations and amino acid residue positions of SEQ ID NO:1.

[0046] In some embodiments, the engineered TA has one or more amino acid alterations of the engineered protein is an alteration at a positions corresponding to the residues shown in Table 7.

[0047] In some embodiments, the engineered TA enzyme has at least a catalytic efficiency for adipate semialdehyde substrate that is at least 1.5×, at least 2×, at least 5×, at least 10×, at least 25×, or 1.5-25× as compared to the corresponding wild-type enzyme having SEQ ID NOs: 1, 13, or 31.

[0048] In some embodiments, the enzymatic conversion of adipate semialdehyde by the engineered transaminase enzyme under known standard conditions is at least 10, at least 20, at least 30, at least 40, at least 50, at least 60, at least 70, at least 80, or at least 90 percent more than the enzymatic activity of the enzyme for the corresponding wild-type enzyme having SEQ ID SEQ ID NOs: 1, 13, or 31.

[0049] In some embodiments, to provide a TA variant, Achromobacter xylosoxidans TA is represented by SEQ ID NO: 1 of the disclosure is selected as a template or parent sequence. Variants, as described herein, can be created by introducing into the template one or more amino acid alterations (e.g. substitutions). The variants can be screened to identify those that have increased activity and/or specificity for their substrates. For example, a TA variant is screened to identify those alterations leading to increased activity and/or specificity for adipate semialdehyde or analogs thereof. Other variants described herein would similarly be screened to identify increased activity and/or specificity for the parent enzyme's substrate or substrates.

[0050] For the purpose of amino acid position numbering, in some embodiments, SEQ ID NO: 1 is used as the reference sequence. Therefore, for example, mention of amino acid position 79 in reference to SEQ ID NO:1, but in the context of a different TA sequence (a target sequence or other template sequence) the corresponding amino acid position for variant creation may have the same or different position number, (e.g. 78, 79 or 80). In some cases, the original amino acid and its position on the SEQ ID NO: 1 reference template will precisely correlate with the original amino acid and position on the target TA sequence. In other cases, the original amino acid and its position on the SEQ ID NO: 1 reference template will correlate with the original amino acid, but its position on the target will not be in the corresponding template position. However, the corresponding amino acid on the target can be a predetermined distance from the position on the template, such as within 10, 9, 8, 7, 6, 5, 4, 3, 2, or 1 amino acid positions from the reference template position. In other cases, the original amino acid on the SEQ ID NO: 1 reference template will not precisely correlate with the original amino acid on the target. However, one can understand what the corresponding amino acid on the target sequence is based on the general location of the amino acid on the template and the sequence of amino acids in the vicinity of the target amino acid. It is understood that sequence alignments can be generated with TA sequences not specifically disclosed herein, and such alignments can be used to understand and generate new TA variants given the teachings and guidance of the current disclosure. In some embodiments, the sequence alignments can allow one to understand common or similar amino acids in the vicinity of the target amino acid, and those amino acids can be viewed as “sequence motif” having a certain amount of identity or similarity to between the template and target sequences. Those sequence motifs can be used to describe portions of TA sequences where variant amino acids are located, and the type of variation(s) that can be present in the motif.

[0051] Also, described are carboxylic acid reductases (CAR) that catalyze the ATP and NADPH-dependent reduction of carboxylic acids to their corresponding aldehydes (Venkitasubramanian et al., J. Biol. Chem. 282:478-485 (2007)). The CARs described herein can be used to convert the intermediate 6ACA to 6-aminocaproate semialdehyde and have E.C. number E.C. 1.2.1.30. 6ACA and 6-aminocaproate semialdehyde are intermediates in, and the conversion of 6ACA to 6-aminocaproate semialdehyde is and enzymatic step in, hexamethylenediamine (HMD) and hexanediol (HDO) pathways described herein. Accordingly, the CARs can be utilized in various pathways leading to nylon intermediates including, for example, the HMD and HDO pathways described herein.

[0052] The desired CARs were identified by homology search as well as metagenomic discovery for the enzymes that can perform the desired reaction in the pathway to produce 6-aminocaproate semialdehyde. To evaluate the CAR for 6ACA utilization, in some embodiments, the assay can be conducted in the forward direction with 6ACA or another candidate substrate as exemplified herein. Similarly, the assay also can be conducted in the reverse direction with 6-aminocaproate semialdehyde or another candidate substrate. The assay can be conducted by direct or indirect measurement of the enzymatic product using methods well known in the art. One exemplary method is an indirect method that is exemplified below and in the Examples.

[0053] In some embodiments, a CAR enzyme from Mycolicibacterium smegmatis MC2 155 encoded by SEQ ID NO:150 was identified. In some embodiments, a CAR enzyme from Mycobacterium avium encoded by SEQ ID NO:153 was identified. To identify other CAR enzymes, SEQ ID NO:150 and SEQ ID NO:153 were used. Homologous enzymes were identified as set out in Table 8. In some embodiments, CAR enzymes or sequences are identified by BLAST. In some embodiments, the CAR shares at least about 40%, 45%, 50%, 55%, 60%, 65%, 70%, 75%, 80%, 8%, 90%, 95%, 96%, 97%, 98%, 99% or 100% sequence identity, to at least 25, 50, 75, 100, 150, 200, 250, 300 or more contiguous amino acids of the amino acid sequences of the CARs of Table 8.

[0054] In some embodiments, the CARs identified in Table 8 share at least about 40%, 45%, 50%, 55%, 60%, 65%, 70%, 75%, 80%, 85%, 90%, 95%, 96%, 97%, 98%, 99% or 100% sequence identity, to at least 25, 50, 75, 100, 150, 200, 250, 300 or more contiguous amino acids of the amino acid sequences of the CARs of SEQ ID NOS:152, 153 or 254.

[0055] In some embodiments, the CAR enzyme has at least about 50% amino acid sequence identity to at least 25, 50, 75, 100, 150, 200, 250, 300, or more contiguous amino acids of any of SEQ ID NOS:150-165, 168-171, 173-178, 180, 183-185, 187-188, 190-193, 195, 198-200, 202-216, 218-219, 221-230, 232-238, 241-244, 246-249, 251-252 and 255-264. In some embodiments the amino acid sequence of the CAR enzyme that reacts with 6ACA to form 6-aminocproate semialdehyde is selected from the amino acid sequences of SEQ ID NOS:150-165, 168-171, 173-178, 180, 183-185, 187-188, 190-193, 195, 198-200, 202-216, 218-219, 221-230, 232-238, 241-244, 246-249, 251-252 and 255-264.

[0056] In some embodiments, the CAR enzymes catalytic efficiency, and/or turnover number for 6ACA as the substrate is similar to when succinate is the substrate. In some embodiments, the CAR enzymes catalytic efficiency and/or turnover number for 6ACA as the substrate is reduced compared to when hexanoate is the substrate. In other embodiments, the CAR enzymes with catalytic efficiency, and/or turnover number for 6ACA as the substrate that is similar to when succinate is the substrate share at least about 40%, 45%, 50%, 55%, 60%, 65%, 70%, 75%, 80%, 85%, 90%, 95%, 96%, 97%, 98%, 99% or 100% sequence identity, to at least 25, 50, 75, 100, 150, 200, 250, 300 or more contiguous amino acids of the amino acid sequences of the CARs of SEQ ID NO:150-165, 168-171, 173-178, 180, 183-185, 187-188, 190-193, 195, 198-200, 202-216, 218-219, 221-230, 232-238, 241-244, 246-249, 251-252 and 255-264. In still other embodiments, the CAR enzymes with catalytic efficiency and/or turnover number for 6ACA as the substrate is reduced compared to when hexanoate is the substrate share at lease about 40%, 45%, 50%, 55%, 60%, 65%, 70%, 75%, 80%, 85%, 90%, 95%, 96%, 97%, 98%, 99% or 100% sequence identity, to at least 25, 50, 75, 100, 150, 200, 250, 300 or more contiguous amino acids of the amino acid sequences of the CARs of SEQ ID NOS:150-165, 168-171, 173-178, 180, 183-185, 187-188, 190-193, 195, 198-200, 202-216, 218-219, 221-230, 232-238, 241-244, 246-249, 251-252 and 255-264.

[0057] The CAR enzymes identified are derived from very genetically diverse organisms. Shown below are the pairwise sequence alignments of some exemplary CARs are shown Table 2.

TABLE 2
Percent identity in pairwise sequence
alignments of exemplary CARs

| | SEQ ID | SEQ ID | SEQ ID | SEQ ID |
|---|---|---|---|---|
| | NO: 152 | NO: 153 | NO: 159 | NO: 254 |
| SEQ ID NO: 152 | | 99% | 34% | 74% |
| SEQ ID NO: 153 | 99% | | 34% | 75% |
| SEQ ID NO: 159 | 34% | 34% | | 36% |
| SEQ ID NO: 254 | 74% | 75% | 36% | |

[0058] The CAR enzymes have conserved domains. Based on the multiple sequence alignments and hidden Markov models (IMMs), the CAR enzymes can comprise the following domains of the Pfam database from the European Bioinformatics Institute (pfam.xfam.org): an AMP-binding domain (Pfam PF00501), a NAD-binding domain (Pfam PF07993), and a phosphopantetheine (PP)-binding domain (Pfam PF00550).

[0059] In some embodiments, amino acid positions were identified for mutation in SEQ ID NO:152 by examination of the crystal structure of the protein, and the gene encoding SEQ ID NO:152 or a homolog thereof was subjected to saturation mutagenesis at selected amino acid positions. Catalytically-relevant residues were identified that can be subject to change to provide a variant amino acid with activity better than the wild-type (unmodified) SEQ ID NO:152 or a homolog thereof. In some embodiments, amino acid positions were identified for mutation in SEQ ID NO:153, and the gene encoding SEQ ID NO:153 or a homolog thereof was used as a template for protein engineering (e.g., subjected to mutagenesis at selected amino acid positions). In some embodiments, amino acid positions were identified for mutation in SEQ ID NO:254, and the gene encoding SEQ ID NO:254 or a homolog thereof was used as a template for protein engineering (e.g., subjected to mutagenesis at selected amino acid positions).

[0060] In some embodiments, CAR enzymes are engineered to have greater specificity for the 6ACA substrate than its corresponding wild-type.

[0061] In some embodiments, the engineered CAR has one or more alterations of an amino acid of SEQ ID NO:152, SEQ ID NO:153 or SEQ ID NO:254. In some embodiments the engineered CAR has alterations in amino acid sequences that have at least one, at least two, at least three, at least four, at least five, at least six, at least seven, or at least eight alterations of an amino acid with respect to SEQ ID NO:152, SEQ ID NO:153 or SEQ ID NO:254. In some embodiments, the engineered CAR has one or more amino acid alterations selected from one or more positions corresponding to residues P141, L245, I247, W270, S274, K275, N276, F278, G279, N279insert, A282, A283, S299, I300, N335, S336, M389, G391, G414, G421, M422, F425, G636, D809, I810, L811, A812 and F929, or one or more combinations of the amino acid alterations and amino acid residue positions of SEQ ID NO:152, 153 or 254.

[0062] In some embodiments, the engineered CAR comprises one or more amino acid alterations at one or more residue positions selected from the group consisting of: N335E; N335D; S274D; S274E; K275D; K275E; S299D; S299E; M389D; M389E; G414D; G414E; G421D; G421E; M422D; M422E; F425D; F425E; N335D and A282P; N335D and A282V; N335D and A283C; N335D, A283C and F929L; N335D, A283C and G636D; N335D and A283G; N335D and F278A; N335D and F278C; N335D and F278S; N335D and F278V; N335D and G279V; N335D and I247M; N335D and I247Q; N335D and I247T; N335D and I247V; N335D and I300C; N335D and I300G; N335D and I300M; N335D and I300M; N335D and I300Y; N335D and K275A; N335D and K275D; N335D and K275D; N335D and K275E; N335D and K275M; N335D and K275N; N335D and K275S; N335D and K275T; N335D and K275V; N335D and K275W; N335D and L245C; N335D and L245G; N335D and L245S; N335D and L245T; N335D and L245V; N335D and M389I; N335D and M389W; N335D and M422D; N335D and N276S; N335D and N279 INSERT; N335D and P141G; N335D and S299D; N335D and S299E; N335D and S391G; N335D and W270M; K275D, N276S, F278S, A283C and N335D; L245V, K275D, N276S, F278S, A283C and N335D; I247M, K275D, N276S, F278A, A283C and N335D; L245V, K275T, N276S, F278S, A283C and N335D; I247M, K275T, N276S, F278S, A283C and N335D; K275D, N276S, F278S, A283C, I300G and N335D; L245T, K275D, N276S, F278A, A283C and N335D; K275N, F278S, A283C, S299D and N335D; I247M, K275N, N276S, F278S, A283C and N335D; K275N, F278S, A283C, I300G and N335D; K275N, N276S, F278S, A283C, I300G and N335D; I247M, K275T, F278S, A283C and N335D; L245V, K275D, N276S, F278A, A283C and N335D; K275N, F278S, A283C, I300G and N335D; K275N, F278A, A283C, S299D and N335D; K275N, N276S, F278A, A283C and N335D; L245V, K275N, N276S, F278S, A283C, I300G and N335D; L245T, K275N, N276S, F278S, A283C, I300G and N335D; K275N, F278A, S299D and N335D; I247M, K275N, F278A, A283C, I300Y and N335D; I247M, K275N, F278A, A283C and N335D; K275D, N276S, F278A and N335D; K275T, F278A, A283C, S299D and N335D; F278A, A282P and N335D; F278A, A283C and N335D; K275N, S299D and N335D; L245T, S299D and N335D; K275D, S299D and N335D; K275N, F278S and N335D; S299D, M389W and N335D; G279V, S299D and N335D; F278A, S283C and N335D; K275D, N276S and N335D; G279V, S299E and N335D; I247M, S299D and N335D; P141G, A282P and N335D; L245T, A282P and N335D; F278S, A283C and N335D; K275D, S284I, S299D and N335D; I247M, I282P and N335D; I247V, K275D, N276S, F278S, A283C, I300G and N335D; I247V, K275D, N276S, F278S, A283C, I300G and N335D; K275D, S274A, N276S, F278S, A283C, I300G and N335D; K275D, S274P, N276S, F278S, A283C, I300G and N335D; K275D, N276S, F278S, A282F, A283C, I300G and N335D; K275D, N276S, F278S, A282P, A283C, I300G and N335D; K275D, N276S, F278S, A283C, S299I, I300G and N335D; K275D, N276S, F278S, A283C, I300G, N335D and M389C; K275D, N276S, F278S, A283C, I300G, N335D and M389Y; and K275D, N276S, F278S, A283C, I300G, N335D and M389S.

[0063] In some embodiments, the one or more amino acid alteration of the engineered protein is a substitution of a conservative or non-conservative amino acid at one or more positions corresponding to residue P141, L245, I247, W270, S274, K275, N276, F278, G279, N279insert, A282, A283, S299, I300, N335, S336, M389, G391, G414, G421, M422, F425, G636, D809, I810, L811, A812 and F929 or one or more combinations of the amino acid alterations and amino acid residue positions of SEQ ID NO:152, 153 or 254.

[0064] In some embodiments, the one or more amino acid alterations of the engineered protein is an alteration at a positions corresponding to the residues shown in Table 9.

[0065] In some embodiments, the engineered CAR enzyme has at least a catalytic efficiency for 6ACA substrate that is at least 1.5×, at least 2×, at least 5×, at least 10×, at least 25×, or 1.5-25× as compared to the corresponding wild-type or parent enzyme having SEQ ID NOS:152, 153, or 254.

[0066] In some embodiments, the enzymatic conversion of 6ACA by the engineered CAR enzyme under known standard conditions is at least 10, at least 20, at least 30, at least 40, at least 50, at least 60, at least 70, at least 80, or at least 90 percent more than the enzymatic activity of the enzyme for the corresponding wild type or parent enzyme having SEQ ID SEQ ID NOS:152, 153 or 254.

[0067] In some embodiments, to provide a CAR variant, Mycobacterium avium or homolog thereof CAR is represented by SEQ ID NOS:152 and 153 of the disclosure is selected as a template or parent sequence. In some embodiments, to provide a CAR variant, Mycobacterium sp. JS623 or homolog thereof CAR is represented by SEQ ID NO:254 of the disclosure is selected as a template or parent sequence. CAR variants described herein can be screened to identify those alterations leading to increased activity and/or specificity for 6ACA or other candidate substrate as exemplified herein.

[0068] For the purpose of amino acid position numbering for CARs described herein, in some embodiments, SEQ ID NO:152 is used as the reference sequence. Therefore, for example, mention of amino acid position 89 in reference to SEQ ID NO:152, but in the context of a different CAR sequence (a target sequence or other template sequence) the corresponding amino acid position for variant creation can have the same or different position number, (e.g. 88, 89 or 90). In some cases, the original amino acid and its position on the SEQ ID NO:152 reference template will precisely correlate with the original amino acid and position on the target CAR sequence. In other cases, the original amino acid and its position on the SEQ ID NO:152 reference template will correlate with the original amino acid, but its position on the target will not be in the corresponding template position. However, the corresponding amino acid on the target can be a predetermined distance from the position on the template, such as within 10, 9, 8, 7, 6, 5, 4, 3, 2, or 1 amino acid positions from the reference template position. In other cases, the original amino acid on the SEQ ID NO:152 reference template will not precisely correlate with the original amino acid on the target. However, one can understand what the corresponding amino acid on the target sequence is based on the general location of the amino acid on the reference template and the sequence of amino acids in the vicinity of the target amino acid. It is understood that sequence alignments can be generated with CAR sequences not specifically disclosed herein, and such alignments can be used to understand and generate new CAR variants given the teachings and guidance of the current disclosure. In some embodiments, the sequence alignments can allow one to understand common or similar amino acids in the vicinity of the target amino acid, and those amino acids can be viewed as “sequence motif” having a certain amount of identity or similarity to between the template and target sequences. Those sequence motifs can be used to describe portions of CAR sequences where variant amino acids are located, and the type of variation(s) that can be present in the motif.

[0069] In some embodiments, the engineered CAR has one or more amino acid alterations of the engineered protein, wherein the one or more alterations is an alteration at a positions corresponding to the residues shown in Table 10. In some embodiments the engineered CAR has alterations in amino acid sequences that have at least one, at least two, at least three, at least four, at least five, at least six, at least seven, or at least eight alterations of an amino acid with respect to SEQ ID NO:153 as shown in Table 10. In some embodiments, the engineered CAR has one or more amino acid alterations shown in Table 10 in addition to the amino acid alteration N335D. In some embodiments, the engineered CAR has one or more amino acid alterations selected from one or more positions corresponding to residues for L245, I247, S274, K275, N276, F278, A282, A283, S299, I300, and M389 of SEQ ID NO:153. In some embodiments, the engineered CAR can comprise a L, T or V at position 245 of SEQ ID NO:153. In some embodiments, the engineered CAR can comprise a I, M or T at position 247 of SEQ ID NO:153. In some embodiments, the engineered CAR can comprise a S, C, A, or P at position 274 of SEQ ID NO:153. In some embodiments, the engineered CAR can comprise a K, D, N, or T at position 275 of SEQ ID NO:153. In some embodiments, the engineered CAR can comprise a N or S at position 276 of SEQ ID NO:153. In some embodiments, the engineered CAR can comprise a F, S or A at position 278 of SEQ ID NO:153. In some embodiments, the engineered CAR can comprise a A, F, or P at position 282 of SEQ ID NO:153. In some embodiments, the engineered CAR can comprise a A or C at position 283 of SEQ ID NO:153. In some embodiments, the engineered CAR can comprise a S or D at position 299 of SEQ ID NO:153. In some embodiments, the engineered CAR can comprise a I, G, or Y at position 300 of SEQ ID NO:153. In some embodiments, the engineered CAR can comprise a M, C, Y, or S at position 389 of SEQ ID NO:153. Mutations can be made singly and in combination with mutations at other amino acid positions shown in Table 10.

[0070] Additionally, described are transaminases (E.C.2.6.1) different from the TA transaminase described above. These transaminase are referred to herein as TA2 transaminase, transaminase TA2 or TA2 and can be used to convert 6-aminocaproate semialdehyde to HMD. 6-aminocaproate semialdehyde is an intermediate in, and the conversion of 6-aminocaproate to HMD is an enzymatic step in HMD pathways described herein. Accordingly, TA2 can be utilized in various pathways leading to nylon intermediates including, for example, the HMID pathways described herein.

[0071] The desired TA2 transaminases were identified by homology search as well as metagenomic discovery for the enzymes that can perform the desired reaction in the pathway to produce hexamethylenediamine (HMD). To evaluate the TA2 for 6-aminocaproate semialdehyde utilization, in some embodiments, the assay can be conducted in the forward direction with 6-aminocaproate semialdehyde or another candidate substrate as exemplified herein. Similarly, the assay also can be conducted in the reverse direction with HMD or another candidate substrate. The assay also can be conducted using 6ACA as with the TA transaminases. Those TA2 transaminases active with 6ACA can then be screened for activity in conversion of 6-aminocaproate semialdehyde to HND. The assay can be conducted by direct or indirect measurement of the enzymatic product using methods well known in the art. One exemplary method is an indirect method that is exemplified below and in the.

[0072] In some embodiments, a TA2 enzyme from Escherichia coli encoded by SEQ ID NO:265 was identified. To identify other TA2 enzymes, SEQ ID NO:265 was used. Homologous enzymes were identified as set out in Table 11. In some embodiments, TA2 enzymes or sequences are identified by BLAST. In some embodiments, the TA2 shares at least about 40%, 45%, 50%, 55%, 60%, 65%, 70%, 75%, 80%, 85%, 90%, 95%, 96%, 97%, 98%, 99% or 100% sequence identity, to at least 25, 50, 75, 100, 150, 200, 250, 300 or more contiguous amino acids of the amino acid sequences of the TA2 of Table 11.

[0073] In some embodiments, the TA2s identified in Table 11 share at least about 40%, 45%, 50%, 55%, 60%, 65%, 70%, 75%, 80%, 85%, 90%, 95%, 96%, 97%, 98%, 99% or 100% sequence identity, to at least 25, 50, 75, 100, 150, 200, 250, 300 or more contiguous amino acids of the amino acid sequences of the TA2 of SEQ ID NO:265.

[0074] In some embodiments, the TA2 enzyme have at least about 50% amino acid sequence identity to at least 25, 50, 75, 100, 150, 200, 250, 300, or more contiguous amino acids of any of SEQ ID NOS:265 and 267-296. In some embodiments the amino acid sequence of the TA2 enzyme that reacts with 6-aminocaproate semialdehyde to form HMD are selected from the amino acid sequences of SEQ ID NOS:265 and 267-296.

[0075] In some embodiments, the TA2 enzymes catalytic efficiency, and/or turnover number for 6-aminocaproate semialdehyde as the substrate is similar to when 6ACA is the substrate. In some embodiments the enzymes with catalytic efficiency, and/or turnover number for 6-aminocaproate semialdehyde as the substrate that is similar to when 6ACA is the substrate share at least about 40%, 45%, 50%, 55%, 60%, 65%, 70%, 75%, 80%, 85%, 90%, 95%, 96%, 97%, 98%, 99% or 100% sequence identity, to at least 25, 50, 75, 100, 150, 200, 250, 300 or more contiguous amino acids of the amino acid sequences of any of the TA2 of SEQ ID NO:265 and 267-296.

[0076] The TA2 enzymes identified are derived from very genetically diverse organisms. Shown below are the pairwise sequence alignments of some exemplary TA2s are shown Table 3.

TABLE 3
Percent identity in pairwise sequence
alignments of exemplary TA2s

| | SEQ ID | SEQ ID | SEQ ID | SEQ ID |
|---|---|---|---|---|
| | NO: 265 | NO: 270 | NO: 289 | NO: 296 |
| SEQ ID NO: 265 | | 45% | 61% | 95% |
| SEQ ID NO: 270 | 45% | | 47% | 47% |
| SEQ ID NO: 289 | 61% | 47% | | 61% |
| SEQ ID NO: 296 | 95% | 47% | 61% | |

[0077] The TA2 enzymes have conserved domains. Based on the multiple sequence alignments and hidden Markov models (HMMs), the TA2 enzymes are grouped into Pfam PF00202, of the Pfam database from the European Bioinformatics Institute (pfam.xfam.org). TA2 enzymes have conserved lysine residues in the active site for pyridoxal phosphate (PLP) binding. The lysine residue and the aldehyde group of PLP can form a Schiff-base structure, resulting in an active conformation.

[0078] In one aspect, provided are a non-naturally occurring microbial organism comprising an exogenous nucleic acid encoding: (a) an engineered carboxylic acid reductase (CAR) enzyme comprising at least one alteration of an amino acid of SEQ ID NOS:152, 153 or 254; (b) a CAR comprising an amino acid sequence having at least 50% sequence identity to at least 25, 50, 75, 100, 150, 200, 250, 300, or more contiguous amino acids of any of SEQ ID NOS:150-165, 168-171, 173-178, 180, 183-185, 187-188, 190-193, 195, 198-200, 202-216, 218-219, 221-230, 232-238, 241-244, 246-249, 251-252 and 255-264; or (c) a hexamethylenediamine (HMD) transaminase (TA2) enzyme having at least 50% sequence identity to at least 25, 50, 75, 100, 150, 200, 250, 300, or more contiguous amino acids of any of SEQ ID NOS:265 and 267-296; and further comprising (d) at least one exogenous nucleic acid encoding an aldehyde dehydrogenase (ALD) enzyme that reacts with adipyl-CoA to form adipate-semialdehyde, wherein the aldehyde dehydrogenase has greater catalytic efficiency for adipyl-CoA substrate as compared to succinyl-CoA, acetyl-CoA, or both succinyl-CoA and acetyl-CoA substrates, and/or the aldehyde dehydrogenase has higher turnover number for adipyl-CoA substrate as compared to succinyl-CoA, acetyl-CoA, or both succinyl-CoA and acetyl-CoA substrates.

[0079] In some embodiments, the one exogenous nucleic acid encoding an ALD enzyme is integrated into the genome of the non-naturally occurring microbial organism. In some embodiments, the exogenous nucleic acid encoding an ALD enzyme is not integrated into the genome of the microbial organism, e.g., a plasmid. In some embodiments, the exogenous nucleic acid encoding an ALD enzyme is heterologous to the microbial organism.

[0080] In some embodiments, the expression of at least one exogenous nucleic acid encoding an ALD enzyme in the non-naturally occurring microbial organism comprising genes encoding a 3-oxoadipyl-CoA thiolase (Thl), a 3-oxoadipyl-CoA dehydrogenase (Hbd), and a 3-oxoadipyl-CoA dehydratase (“crotonase” or Crt), a 5-carboxy-2-pentenoyl-CoA reductase (Ter), and a transaminase (TA), hexamethylenediamine (HMD) transaminase (TA2) and carboxylic acid reductase (CAR) increases the production of HMD as compared to a control microorganism comprising genes encoding a 3-oxoadipyl-CoA thiolase (Thl), a 3-oxoadipyl-CoA dehydrogenase (Hbd), and a 3-oxoadipyl-CoA dehydratase (“crotonase” or Crt), a 5-carboxy-2-pentenoyl-CoA reductase (Ter), and a transaminase (TA), hexamethylenediamine (HMD) transaminase (TA2) and carboxylic acid reductase (CAR) without exogenous nucleic acid encoding an ALD enzyme.

[0081] To identify ALD enzymes with greater catalytic efficiency, greater turnover number or both for adipyl CoA substrate than for succinyl-CoA, acetyl CoA, or both substrates, an exemplary sequence of Clostridium kluyveri DSM555, encoded by the gene adh (SEQ ID NO: 141) was used to identify other aldehyde dehydrogenase enzymes. Homologous enzymes were identified as set forth in Table 4.

[0082] In some embodiments, aldehyde dehydrogenase enzymes or sequences are identified by BLAST. In some embodiments, the aldehyde dehydrogenase share at least about 40%, 45%, 50%, 55%, 60%, 65%, 70%, 75%, 80%, 85%, 90%, 95%, 96%, 97%, 98%, 99% or 100% sequence identity, to at least 50, 75, 100, 150, 200, 250, 300, or more contiguous amino acids of the amino acid sequences of the ALDs of Table 4.

[0083] These ALD enzymes are derived from very genetically diverse organisms. Often a simple amino acid sequence identity between the sequences is not indicative of their common function. For example, the pairwise sequence alignment results of some exemplary aldehyde dehydrogenases disclosed in Table 4 are shown below in Table 12.

TABLE 12
Percent identity in pairwise sequence
alignments of exemplary ALDs

| | SEQ ID | SEQ ID | SEQ ID | SEQ ID |
|---|---|---|---|---|
| | NO: 298 | NO: 306 | NO: 323 | NO: 347 |
| SEQ ID NO: 298 | | 50% | 56% | 60% |
| Source organism: | | | | |
| Peptostreptococcaceae | | | | |
| bacterium oral | | | | |
| SEQ ID NO: 306 | 50% | | 53% | 57% |
| Source organism: | | | | |
| Acidaminococcus | | | | |
| massiliensis | | | | |
| SEQ ID NO: 323 | 56% | 53% | | 60% |
| Source organism: | | | | |
| Collinsella sp. GD7 | | | | |
| SEQ ID NO: 347 | 60% | 67% | 60% | |
| Source organism: | | | | |
| Romboutsia | | | | |
| lituseburensis DSM | | | | |

[0084] These ALD enzymes have multiple conserved domains, for example, N-terminal domain, C-terminal domain, and a cysteine residue at its active site. The ALD comprise a cofactor binding domain with a Rossmann-fold type nucleotide binding architecture. The Rossmann fold, also called βαβ fold, is a super-secondary structure that is characterized by an alternating motif of beta-strand-alpha helix-beta strand secondary structures. The β-strands participate in the formation of a β-sheet. The Pap fold structure is commonly observed in enzymes that have dinucleotide coenzymes, such as FAD, NAD and NADP. The Pap fold structure was associated with a specific Gly-rich sequence of (GxGxxG) at the region of the tight loop between the first β-strand the α-helix. In addition, the cofactor binding domain is also the same domain that binds the substrate CoA. It is typical feature of ALDs, where the substrate CoA binds first, forms the intermediate, then the cofactor binds and completes the chemistry and performs the hydride transfer.

[0085] Based on the multiple sequence alignments and hidden Markov models (HMMs), the ALD enzymes are grouped into Pfam PF00171, Clan CL0099 of the Pfam database from the European Bioinformatics Institute (pfam.xfam.org). These enzymes are classified as EC 1.2.1 according to the Enzyme Commission nomenclature.

[0086] For any of the enzymes described here, in some cases it can be useful to use the Basic Local Alignment Search Tool (BLAST) algorithm to understand the sequence identity between an amino acid motif in a template sequence and a target sequence. Therefore, in preferred modes of practice, BLAST is used to identify or understand the identity of a shorter stretch of amino acids (e. g. a sequence motif) between a template and a target protein. BLAST finds similar sequences using a heuristic method that approximates the Smith-Waterman algorithm by locating short matches between the two sequences. The (BLAST) algorithm can identify library sequences that resemble the query sequence above a certain threshold. Exemplary parameters for determining relatedness of two or more sequences using the BLAST algorithm, for example, can be as set forth below. Briefly, amino acid sequence alignments can be performed using BLASTP version 2. 0. 8 (Jan. 5, 1999) and the following parameters:Matrix: 0 BLOSUM62; gap open: 11; gap extension: 1; x_dropoff: 50; expect: 10. 0; wordsize: 3; filter: on. Nucleic acid sequence alignments can be performed using BLASTN version 2. 0. 6 (Sep. 16, 1998) and the following parameters: Match: 1; mismatch: −2; gap open: 5; gap extension: 2; x_dropoff: 50; expect: 10. 0; wordsize: 11; filter: off. Those skilled in the art will know what modifications can be made to the above parameters to either increase or decrease the stringency of the comparison, for example, and determine the relatedness of two or more sequences.

[0087] Site-directed mutagenesis or sequence alteration (e. g., site-specific mutagenesis or oligonucleotide-directed) can be used to make specific changes to a target TA DNA sequence to provide a variant DNA sequence encoding TA with the desired amino acid substitution. As a general matter, an oligonucleotide having a sequence that provides a codon encoding the variant amino acid is used. In some embodiments, artificial gene synthesis of the entire coding region of the variant TA DNA sequence is performed as preferred TA targeted for substitution are generally less than 150 amino acids long.

[0088] Exemplary techniques using mutagenic oligonucleotides for generation of a variant TA or CAR sequence include the Kunkel method which may utilize a TA or CAR gene sequence placed into a phagemid. The phagemid in E. coli TA ssDNA which is the template for mutagenesis using an oligonucleotide which is a primer extended on the template.

[0089] Depending on the restriction enzyme sites flanking a location of interest in the TA or CAR DNA, cassette mutagenesis may be used to create a variant sequence of interest. For cassette mutagenesis, a DNA fragment is synthesized inserted into a plasmid, cleaved with a restriction enzyme, and then subsequently ligated to a pair of complementary oligonucleotides containing the TA or CAR variant mutation. The restriction fragments of the plasmid and oligonucleotide can be ligated to one another.

[0090] In other embodiments, another technique used to generate the variant TA or CAR sequence is PCR site directed mutagenesis. Mutagenic oligonucleotide primers are used to introduce the desired mutation and to provide a PCR fragment carrying the mutated sequence. Additional oligonucleotides may be used to extend the ends of the mutated fragment to provide restriction sites suitable for restriction enzyme digestion and insertion into the gene.

[0091] Commercial kits for site-directed mutagenesis techniques are also available. For example, the Quikchange™ kit uses complementary mutagenic primers to PCR amplify a gene region using a high-fidelity non-strand-displacing DNA polymerase such as pfu polymerase. The reaction generates a nicked, circular DNA which is relaxed. The template DNA is eliminated by enzymatic digestion with a restriction enzyme such as DpnI which is specific for methylated DNA.

[0092] In some embodiments, optimization method is directed evolution. Directed evolution is a powerful apprTAh that involves the introduction of mutations targeted to a specific gene to improve and/or alter the properties of an enzyme. Improved and/or altered enzymes can be identified through the development and implementation of sensitive high-throughput screening assays that allow the automated screening of many enzyme variants (for example, >104). Iterative rounds of mutagenesis and screening typically are performed to afford an enzyme with optimized properties. Computational algorithms that can help to identify areas of the gene for mutagenesis also have been developed and can significantly reduce the number of enzyme variants that need to be generated and screened. Numerous directed evolution technologies have been developed (for reviews, see Hibbert et al., Biomol. Eng 22:11-19 (2005); Huisman and Lalonde, In Biocatalysis in the pharmaceutical and biotechnology industries pgs. 717-742 (2007), Patel (ed.), CRC Press; Otten and Quax. Biomol. Eng 22:1-9 (2005); and Sen et al., Appl Biochem. Biotechnol 143:212-223 (2007)) to be effective at creating diverse variant libraries, and these methods have been successfully applied to the improvement of a wide range of properties across many enzyme classes. Enzyme characteristics that have been improved and/or altered by directed evolution technologies include, for example: selectivity/specificity, for conversion of non-natural substrates; temperature stability, for robust high temperature processing; pH stability, for bioprocessing under lower or higher pH conditions; substrate or product tolerance, so that high product titers can be achieved; binding (Km), including broadening substrate binding to include non-natural substrates; inhibition (Ki), to remove inhibition by products, substrates, or key intermediates; activity (kcat), to increases enzymatic reaction rates to achieve desired flux; expression levels, to increase protein yields and overall pathway flux; oxygen stability, for operation of air sensitive enzymes under aerobic conditions; and anaerobic activity, for operation of an aerobic enzyme in the absence of oxygen.

[0093] A number of exemplary methods have been developed for the mutagenesis and diversification of genes to target desired properties of specific enzymes. Such methods are well-known to those skilled in the art. Any of these can be used to alter and/or optimize the activity of a 6ACA, hexamethylenediamine, caprolactam or 1,6-hexanediol pathway enzyme or protein. Such methods include, but are not limited to EpPCR, which introduces random point mutations by reducing the fidelity of DNA polymerase in PCR reactions (Pritchard et al., J Theor. Biol. 234:497-509 (2005)); Error-prone Rolling Circle Amplification (epRCA), which is similar to epPCR except a whole circular plasmid is used as the template and random 6-mers with exonuclease resistant thiophosphate linkages on the last 2 nucleotides are used to amplify the plasmid followed by transformation into cells in which the plasmid is re-circularized at tandem repeats (Fujii et al., Nucleic Acids Res. 32:e145 (2004); and Fujii et al., Nat. Protoc. 1:2493-2497 (2006)); DNA or Family Shuffling, which typically involves digestion of two or more variant genes with nucleases such as Dnase I or EndoV to generate a pool of random fragments that are reassembled by cycles of annealing and extension in the presence of DNA polymerase to create a library of chimeric genes (Stemmer, Proc Natl Acad Sci USA 91:10747-10751 (1994); and Stemmer, Nature 370:389-391 (1994)); Staggered Extension (StEP), which entails template priming followed by repeated cycles of 2 step PCR with denaturation and very short duration of annealing/extension (as short as 5 sec) (Zhao et al., Nat. Biotechnol. 16:258-261 (1998)); Random Priming Recombination (RPR), in which random sequence primers are used to generate many short DNA fragments complementary to different segments of the template (Shao et al., Nucleic Acids Res 26:681-683 (1998)).

[0094] Additional methods include Heteroduplex Recombination, in which linearized plasmid DNA is used to form heteroduplexes that are repaired by mismatch repair (Volkov et al, Nucleic Acids Res. 27:e18 (1999); and Volkov et al., Methods Enzymol. 328:456-463 (2000)); Random Chimeragenesis on Transient Templates (RACHITT), which employs Dnase I fragmentation and size fractionation of single stranded DNA (ssDNA) (Coco et al., Nat. Biotechnol. 19:354-359 (2001)); Recombined Extension on Truncated templates (RETT), which entails template switching of unidirectionally growing strands from primers in the presence of unidirectional ssDNA fragments used as a pool of templates (Lee et al., J. Molec. Catalysis 26:119-129 (2003)); Degenerate Oligonucleotide Gene Shuffling (DOGS), in which degenerate primers are used to control recombination between molecules; (Bergquist and Gibbs, Methods Mol. Biol 352:191-204 (2007); Bergquist et al., Biomol. Eng 22:63-72 (2005); Gibbs et al., Gene 271:13-20 (2001)); Incremental Truncation for the Creation of Hybrid Enzymes (ITCHY), which creates a combinatorial library with 1 base pair deletions of a gene or gene fragment of interest (Ostermeier et al., Proc. Natl. Acad Sci. USA 96:3562-3567 (1999); and Ostermeier et al., Nat. Biotechnol. 17:1205-1209 (1999)); Thio-Incremental Truncation for the Creation of Hybrid Enzymes (THIO-ITCHY), which is similar to ITCHY except that phosphothioate dNTPs are used to generate truncations (Lutz et al., Nucleic Acids Res 29:E16 (2001)); SCRATCHY, which combines two methods for recombining genes, ITCHY and DNA shuffling (Lutz et al., Proc. Natl. Acad Sci. USA 98:11248-11253 (2001)); Random Drift Mutagenesis (RNDM), in which mutations made via epPCR are followed by screening/selection for those retaining usable activity (Bergquist et al., Biomol. Eng. 22:63-72 (2005)); Sequence Saturation Mutagenesis (SeSaM), a random mutagenesis method that generates a pool of random length fragments using random incorporation of a phosphothioate nucleotide and cleavage, which is used as a template to extend in the presence of “universal” bases such as inosine, and replication of an inosine-containing complement gives random base incorporation and, consequently, mutagenesis (Wong et al., Biotechnol. J. 3:74-82 (2008); Wong et al., Nucleic Acids Res. 32:e26 (2004); and Wong et al., Anal. Biochem. 341:187-189 (2005)); Synthetic Shuffling, which uses overlapping oligonucleotides designed to encode “all genetic diversity in targets” and allows a very high diversity for the shuffled progeny (Ness et al., Nat. Biotechnol. 20:1251-1255 (2002)); Nucleotide Exchange and Excision Technology NexT, which exploits a combination of dUTP incorporation followed by treatment with uracil DNA glycosylase and then piperidine to perform endpoint DNA fragmentation (Muller et al., Nucleic Acids Res. 33:e17 (2005)).

[0095] Further methods include Sequence Homology-Independent Protein Recombination (SHIPREC), in which a linker is used to facilitate fusion between two distantly related or unrelated genes, and a range of chimeras is generated between the two genes, resulting in libraries of single-crossover hybrids (Sieber et al., Nat. Biotechnol. 19:456-460 (2001)); Gene Site Saturation Mutagenesis™ (GSSM™), in which the starting materials include a supercoiled double stranded DNA (dsDNA) plasmid containing an insert and two primers which are degenerate at the desired site of mutations (Kretz et al., Methods Enzymol. 388:3-11 (2004)); Combinatorial Cassette Mutagenesis (CCM), which involves the use of short oligonucleotide cassettes to replace limited regions with a large number of possible amino acid sequence alterations (Reidhaar-Olson et al. Methods Enzymol. 208:564-586 (1991); and Reidhaar-Olson et al. Science 241:53-57 (1988)); Combinatorial Multiple Cassette Mutagenesis (CMCM), which is essentially similar to CCM and uses epPCR at high mutation rate to identify hot spots and hot regions and then extension by CMCM to cover a defined region of protein sequence space (Reetz et al., Angew. Chem. Int. Ed Engl. 40:3589-3591 (2001)); the Mutator Strains technique, in which conditional ts mutator plasmids, utilizing the mutD5 gene, which encodes a mutant subunit of DNA polymerase III, to allow increases of 20 to 4000-X in random and natural mutation frequency during selection and block accumulation of deleterious mutations when selection is not required (Selifonova et al., Appl. Environ. Microbiol. 67:3645-3649 (2001)); Low et al., J. Mol. Biol. 260:359-3680 (1996)).

[0096] Additional exemplary methods include Look-Through Mutagenesis (LTM), which is a multidimensional mutagenesis method that assesses and optimizes combinatorial mutations of selected amino acids (Rajpal et al., Proc. Natl. Acad Sci. USA 102:8466-8471 (2005)); Gene Reassembly, which is a DNA shuffling method that can be applied to multiple genes at one time or to create a large library of chimeras (multiple mutations) of a single gene (Tunable GeneReassembly™ (TGR™) Technology supplied by Verenium Corporation), in Silico Protein Design Automation (PDA), which is an optimization algorithm that anchors the structurally defined protein backbone possessing a particular fold, and searches sequence space for amino acid substitutions that can stabilize the fold and overall protein energetics, and generally works most effectively on proteins with known three-dimensional structures (Hayes et al., Proc. Natl. Acad Sci. USA 99:15926-15931 (2002)); and Iterative Saturation Mutagenesis (ISM), which involves using knowledge of structure/function to choose a likely site for enzyme improvement, performing saturation mutagenesis at chosen site using a mutagenesis method such as Stratagene QuikChange (Stratagene; San Diego Calif.), screening/selecting for desired properties, and, using improved clone(s), starting over at another site and continue repeating until a desired activity is achieved (Reetz et al., Nat. Protoc. 2:891-903 (2007); and Reetz et al., Angew. Chem. Int. Ed Engl. 45:7745-7751 (2006)).

[0097] Any of the aforementioned methods for mutagenesis can be used alone or in any combination. Additionally, any one or combination of the directed evolution methods can be used in conjunction with adaptive evolution techniques, as described herein.

[0098] A cell having the desired enzymatic activity can be identified using any method known in the art. For example, enzyme activity assays can be used to identify cells having enzyme activity, see, for example, Enzyme Nomenclature, Academic Press, Inc., New York 2007. Other assays that can be used to determine reaction of TA on adipate semialdhyde, CAR on 6ACA and/or TA2 on 6-aminocaproate semialdehyde include GC/MS analysis. In other examples, levels of NADH/NADPH can be monitored. For example, the NADH/NADPH can be monitored colorimetrically or spectroscopically using NADP/NADPH assay kits (e.g. ab65349 available from ABCAM™).

[0099] The disclosed TA enzyme can be used in pathways for the production of nylon intermediates. In some embodiments, a non-naturally occurring microorganism can be used in the production of adipate semialdehyde or other nylon intermediates that are produced using the adipate semialdehyde as an intermediate. One exemplary intermediate using adipate semialdehyde as a substrate for a TA enzyme described herein is 6ACA.

[0100] The disclosed CAR enzyme can be used in pathways for the production of nylon intermediates and/or for the production 1,6-hexanediol intermediates. In some embodiments, a non-naturally occurring microorganism can be used in the production of 6ACA or other nylon intermediate, or a 1,6-hexandiol intermediate that are produced using the 6ACA as an intermediate. One exemplary intermediate for both nylon and 1,6-hexanediol using 6ACA as a substrate for a CAR enzyme described herein is 6-aminocaproate semialdehyde. Accordingly, certain nylon intermediates can also be 1,6-hexanediol intermediates (see, e.g., FIG. 8) and, unless otherwise stated, are referred to herein as nylon intermediates.

[0101] The disclosed TA2 enzyme can be used in pathways for the production of nylon intermediates. In some embodiments, a non-naturally occurring microorganism can be used in the production of 6-aminocaproate semialdehyde or other nylon intermediates that are produced using the 6-aminocaproate semialdehyde as an intermediate. One exemplary intermediate using 6-aminocaproate semialdehyde as a substrate for a TA2 enzyme described herein is hexamethylenediamine.

[0102] In some embodiments, genetically modified cells (e. g. non-naturally occurring microorganisms) are capable of producing the nylon intermediates such as 6-aminocaproic acid, caprolactam, and hexamethylenediamine.

[0103] In some embodiments, the nylon intermediates are biosynthesized using the pathway described in FIG. 1. In some embodiments, FIG. 1 pathway is provided in genetically modified cell described herein (e. g., a non-naturally occurring microorganism) where the pathway includes at least one exogenous nucleic acid encoding a pathway enzyme expressed in a sufficient amount to produce 6-aminocaproic acid, caprolactam, and hexamethylenediamine.

[0104] In some embodiments the pathway is an HMD pathway as set forth in FIG. 1. The HMD pathway is provided in genetically modified cell described herein (e. g., a non-naturally occurring microorganism) where the HMD pathway includes at least one exogenous nucleic acid encoding a HMD pathway enzyme expressed in a sufficient amount to produce HMD. The enzymes are 1A is a 3-oxoadipyl-CoA thiolase; 1B is a 3-oxoadipyl-CoA reductransaminasee; 1C is a 3-hydroxyadipyl-CoA dehydratransaminasee; 1D is aadipate semialdehydereductransaminasee; 1E is a 3-oxoadipyl-CoA/acyl-CoA transferase; 1F is a 3-oxoadipyl-CoA synthase; 1G is a 3-oxoadipyl-CoA hydrolase; 1H is a 3-oxoadipate reductransaminasee; 1I is a 3-hydroxyadipate dehydratransaminasee; 1J is a 5-carboxy-2-pentenoate reductransaminasee; 1K is an adipyl-CoA/acyl-CoA transferase; 1L is an adipyl-CoA synthase; 1M is an adipyl-CoA hydrolase; 1N is an adipyl-CoA reductransaminasee (aldehyde forming); 1O is a 6-aminocaproate transaminase; 1P is a 6-aminocaproate dehydrogenase; 1Q is a 6-aminocaproyl-CoA/acyl-CoA transferase; 1R is a 6-aminocaproyl-CoA synthase; 1S is an amidohydrolase; 1T is spontaneous cyclization; 1U is a 6-aminocaproyl-CoA reductransaminasee (aldehyde forming); 1V is a HMID transaminase; and 1W is a HMD dehydrogenase.

[0105] With reference to FIG. 1, in some embodiments, the non-naturally occurring microorganism has one or more of the following pathways: ABCDNOPQRUVW; ABCDNOPQRT; or: ABCDNOPS. Other exemplary pathways that include the TA enzyme to produce adipate semialdehyde include those described in U.S. Pat. No. 8,377,680 incorporated herein by reference in its entirety.

[0106] FIG. 1 also shows a pathway from 6-aminocaproate to 6-aminocaproyl-CoA by a transferase or synthase enzyme (FIG. 1, Step Q or R) followed by the spontaneous cyclization of 6-aminocaproyl-CoA to form caprolactam (FIG. 1, Step T). In other embodiments, 6-aminocaproate is activated to 6-aminocaproyl-CoA (FIG. 1, Step Q or R), followed by a reduction (FIG. 1, Step U) and amination (FIG. 1, Step V or W) to form HMD. 6-Aminocaproic acid can also be activated to 6-aminocaproyl-phosphate instead of 6-aminocaproyl-CoA. 6-Aminocaproyl-phosphate can spontaneously cyclize to form caprolactam. In some embodiments, 6-aminocaproyl-phosphate can be reduced to 6-aminocaproate semialdehyde, which can be then converted to HMD as depicted in FIG. 1.

[0107] In some embodiments, the non-naturally occurring microrganisms can generate adipate, 6ACA, caprolactone, hexamethyelenediamine or caproclactam as shown in the pathways of FIG. 4-10.

[0108] In some embodiments, the non-naturally occurring microrganisms can generate 1,6-hexandiol. FIG. 8 exemplifies biosynthetic pathways to 1,6-hexanediol through nylon intermediates such as 6ACA, 6-aminocaproyl-CoA, 6-aminocaproate semialdehyde, adipate, adipyl-CoA and aidpate semialdehyde.

[0109] In some embodiments, the non-naturally occurring microbial organisms further include an exogenously expressed nucleic acid encoding an aldehyde dehydrognease (ALD) or a transenoyl reductase (TER) or both. The ALD reacts with adipyl-CoA to produce adipate semialdehyde, whereas the TER reacts with 5-carboxy-2-pentenoyl-CoA (CPCoA) to form adipylCoA.

[0110] In some embodiments, the ALD enzymes have greater catalytic efficiency and activity for the adipyl CoA substrate as compared to succinyl-CoA, or acetyl-CoA, or both substrates. In some embodiments, the ALD enzymes are as shown below in Table 4. In some embodiments, the TER enzyme sequences that can be exogenously expressed from an encoding nucleic acid in a non-naturally occurring microorganism of the disclosure are as shown below in Table 5.

[0111] In some embodiments, the TA enzyme sequences that can be exogenously expressed from an encoding nucleic acid in a non-naturally occurring microorganism of the disclosure are shown below in Table 6. In some embodiments, the TA enzyme variant sequences that can be exogenously expressed from an encoding nucleic acid in a non-naturally occurring microorganism of the are shown below in Table 7.

[0112] In some embodiments, the CAR enzyme sequences that can be exogenously expressed from an encoding nucleic acid in a non-naturally occurring microorganism of the disclosure are shown below in Table 8. In some embodiments, the CAR variant sequences that can be exogenously expressed from an encoding nucleic acid in a non-naturally occurring microorganism of the disclosure are shown below in Table 9.

[0113] In some embodiments, the CAR enzyme sequences that can be exogenously expressed from an encoding nucleic acid in a non-naturally occurring microorganism of the disclosure comprises an amino acid sequence of SEQ ID NO: 153 and one or more amino acid alterations shown below in Table 10. In some embodiments, the CAR enzyme can comprise 1, 2, 3, 4, 5, 6, 7, or 8 amino acid alterations shown below in Table 10.

[0114] In some embodiments, the TA2 enzyme sequences that can be exogenously expressed from an encoding nucleic acid in a non-naturally occurring microorganism of the disclosure are shown below in Table 11.

[0115] Any, some or all of the TA, CAR, TA2, TER and/or ALD enzymes described herein can be used in any of the biosynthetic pathways described herein so long as the substrate and products of the referenced TA, CAR, TA2, TER and/or ALD enzymatic conversion or conversions are intermediates within the described pathway. For example, a TER can be substituted into any pathway described herein for the referenced enzyme having a conversion of 5-carboxy-2-pentenoyl-CoA (also referred to as 2,3-dehydroadipyl-CoA) to adipyl-CoA. Similarly, an ALD can be substituted into any pathway described herein for the referenced enzyme having a conversion of adipyl-CoA to adipate semialdehyde. Further, a TA enzyme can be substituted into any pathway described herein for the referenced enzyme having a conversion of adipate semialdehyde to 6ACA. Still further, CAR enzyme can be substituted into any pathway described herein for the referenced enzyme having a conversion of 6ACA to 6-aminocaproate semialdehyde. Additionally, TA2 enzyme can be substituted into any pathway described herein for the referenced enzyme having a conversion of 6-aminocaproate to HMD. Accordingly, any combination and/or permutation of any one, two, three, four or all five of TA, CAR, TA2, TER and/or ALD can be utilized in a biosynthetic pathway described herein.

[0116] One exemplary pathway that can utilize any, some or all of TA, CAR, TA2, TER and/or ALD is represented in FIG. 10 by reference to one specific embodiment where all of TA, CAR, TA2, TER and ALD are utilized. In some embodiments, the nylon intermediates are biosynthesized using the pathway described in FIG. 10. In some embodiments, FIG. 10 pathway is provided in genetically modified cell described herein (e.g., a non-naturally occurring microorganism) where the pathway includes at least one exogenous nucleic acid encoding a pathway enzyme expressed in a sufficient amount to produce 6-aminocaproic acid, 6-aminoaproate semialdehyde and hexamethylenediamine.

[0117] In some embodiments the pathway is an HMD pathway as set forth in FIG. 10. The HMD pathway is provided in genetically modified cell described herein (e. g., a non-naturally occurring microorganism) where the HMD pathway includes at least one exogenous nucleic acid encoding a HMD pathway enzyme expressed in a sufficient amount to produce HMD. Starting from succinyl-CoA and acetyl-CoA the enzymes are designated are: (A) thiolase; (B) hydroxyadipyl-CoA dehydrogenase (HBD); (C) crotonase; (D) trans-enoyl-CoA reductase (Ter); (E) 6ACA-aldehyde dehydrogenase (ALD); (F) 6ACA-transaminase (TA); (G) CoA transferase/CoA ligase; (H) HMD-aldehyde dehydrogenase (ALD); (I) carboxylic acid reductase (CAR), and (J) HMD-transaminase (TA2). An exogenous nucleic acid encoding phosphopantetheinyl transferase (PPTase) can additionally be included. Employing a CAR enzyme, this pathway can omit steps G and H. Without using CAR, step I can be omitted.

[0118] With reference to FIG. 10 and with utilization of a CAR enzyme described herein, the non-naturally occurring microorganism has the following HMD pathway: ABCDEFIJ where step I is the CAR conversion of 6ACA to 6-amainocaproate. Enzymes D, E, F and J for the above pathway correspond to the TER, ALD, TA and TA2 enzymes, respectfully.

[0119] As used herein, the term “non-naturally occurring” when used in reference to a microbial organism or microorganism is intended to mean that the microbial organism has at least one genetic alteration not normally found in a naturally occurring strain of the referenced species, including wild-type strains of the referenced species. Genetic alterations include, for example, modifications introducing expressible nucleic acids encoding metabolic polypeptides, other nucleic acid additions, nucleic acid deletions and/or other functional disruption of the microbial genetic material. Such modifications include, for example, coding regions and functional fragments thereof, for heterologous, homologous or both heterologous and homologous polypeptides for the referenced species. Additional modifications include, for example, non-coding regulatory regions in which the modifications alter expression of a gene or operon. Exemplary metabolic polypeptides include enzymes within a 6-aminocaproic acid, caprolactam, hexamethylenediamine or 1,6-hexanediol biosynthetic pathway described herein.

[0120] A metabolic modification refers to a biochemical reaction that is altered from its naturally occurring state. Therefore, non-naturally occurring microorganisms can have genetic modifications to nucleic acids encoding metabolic polypeptides or, functional fragments thereof. Exemplary metabolic modifications are disclosed herein.

[0121] As used herein, the terms “microbial,” “microbial organism” or “microorganism” has been used interchangeably and is intended to mean any organism that exists as a microscopic cell that is included within the domains of archaea, bacteria or eukarya. Therefore, the term is intended to encompass prokaryotic or eukaryotic cells or organisms having a microscopic size and includes bacteria, archaea and eubacteria of all species as well as eukaryotic microorganisms such as yeast and fungi. The term also includes cell cultures of any species that can be cultured for the production of a biochemical.

[0122] As used herein, the term “CoA” or “coenzyme A” is intended to mean an organic cofactor or prosthetic group (nonprotein portion of an enzyme) whose presence is required for the activity of many enzymes (the apoenzyme) to form an active enzyme system. Coenzyme A functions in certain condensing enzymes, acts in acetyl or other acyl group transfer and in fatty acid synthesis and oxidation, pyruvate oxidation and in other acetylation.

[0123] As used herein, “adipate,” having the chemical formula —OOC—(CH₂)₄—COO— (see FIG. 1) (IUPAC name hexanedioate), is the ionized form of adipic acid (IUPAC name hexanedioic acid), and it is understood that adipate and adipic acid can be used interchangeably throughout to refer to the compound in any of its neutral or ionized forms, including any salt forms thereof. It is understood by those skilled understand that the specific form will depend on the pH.

[0124] As used herein, “6-aminocaproate,” having the chemical formula —OOC—CH₂)₅—NH₂ (see FIG. 1, and abbreviated as 6-ACA), is the ionized form of 6-aminocaproic acid (IUPAC name 6-aminohexanoic acid), and it is understood that 6-aminocaproate and 6-aminocaproic acid can be used interchangeably throughout to refer to the compound in any of its neutral or ionized forms, including any salt forms thereof. It is understood by those skilled understand that the specific form will depend on the pH.

[0125] As used herein, “caprolactam” (IUPAC name azepan-2-one) is a lactam of 6-aminohexanoic acid (see FIG. 1, and abbreviated as CPO).

[0126] As used herein, “hexamethylenediamine,” also referred to as 1,6-diaminohexane or 1,6-hexanediamine, has the chemical formula H2N(CH2)6NH2 (see FIG. 1 and abbreviated as HMD).

[0127] As used herein, “1,6-hexanediol,” also referred to as hexane-1,6-diol and hexamethylenediol, has the chemical structure C₆H₁₄O₂ (see FIG. 8 and abbreviated as HDO).

[0128] As used herein, the term “substantially anaerobic” when used in reference to a culture or growth condition is intended to mean that the amount of oxygen is less than about 10% of saturation for dissolved oxygen in liquid media. The term also is intended to include sealed chambers of liquid or solid medium maintained with an atmosphere of less than about 1% oxygen.

[0129] As used herein, the term “osmoprotectant” when used in reference to a culture or growth condition is intended to mean a compound that acts as an osmolyte and helps a microbial organism as described herein survive osmotic stress. Osmoprotectants include, for example, betaines, amino acids, and the sugar trehalose. Non-limiting examples of such are glycine betaine, praline betaine, dimethylthetin, dimethylslfonioproprionate, 3-dimethylsulfonio-2-methylproprionate, pipecolic acid, dimethylsulfonioacetate, choline, L-carnitine and ectoine.

[0130] As used herein, the term “growth-coupled” when used in reference to the production of a biochemical is intended to mean that the biosynthesis of the referenced biochemical is produced during the growth phase of a microorganism. In a particular embodiment, the growth-coupled production can be obligatory, meaning that the biosynthesis of the referenced biochemical is an obligatory product produced during the growth phase of a microorganism.

[0131] As used herein, “metabolic modification” is intended to refer to a biochemical reaction that is altered from its naturally occurring state. Metabolic modifications can include, for example, elimination of a biochemical reaction activity by functional disruptions of one or more genes encoding an enzyme participating in the reaction.

[0132] As used herein, the term “gene disruption,” or grammatical equivalents thereof, is intended to mean a genetic alteration that renders the encoded gene product inactive. The genetic alteration can be, for example, deletion of the entire gene, deletion of a regulatory sequence required for transcription or translation, deletion of a portion of the gene which results in a truncated gene product, or by any of various mutation strategies that inactivate the encoded gene product. One particularly useful method of gene disruption is complete gene deletion because it reduces or eliminates the occurrence of genetic reversions in the non-naturally occurring microorganisms.

[0133] “Exogenous” as it is used herein is intended to mean that the referenced molecule or the referenced activity is introduced into the host microbial organism. The molecule can be introduced, for example, by introduction of an encoding nucleic acid into the host genetic material such as by integration into a host chromosome or as non-chromosomal genetic material such as a plasmid. Therefore, the term as it is used in reference to expression of an encoding nucleic acid refers to introduction of the encoding nucleic acid in an expressible form into the microbial organism. When used in reference to a biosynthetic activity, the term refers to an activity that is introduced into the host reference organism. The source can be, for example, a homologous or heterologous encoding nucleic acid that expresses the referenced activity following introduction into the host microbial organism. Therefore, the term “endogenous” refers to a referenced molecule or activity that is present in the host. Similarly, the term when used in reference to expression of an encoding nucleic acid refers to expression of an encoding nucleic acid contained within the microbial organism.

[0134] The term “heterologous” refers to a molecule, material, or activity derived from a source other than the referenced species whereas “homologous” refers to a molecule, material, or activity derived from the host microbial organism. Accordingly, exogenous expression of an encoding nucleic acid can utilize either or both a heterologous or homologous encoding nucleic acid.

[0135] As used herein the term “about” means±10% of the stated value. The term “about” can mean rounded to the nearest significant digit. Thus, about 5% means 4.5% to 5.5%. Additionally, about in reference to a specific number also includes that exact number. For example, about 5% also includes exact 5%.

[0136] As used herein the term “bioderived” in the context of 6-aminocaproic acid, 1,6-hexanediol, caprolactone, caprolactam, hexamethylenediamine or 1,6-hexanediol means that these compounds are synthesized in a microbial organism.

[0137] It is understood that when more than one exogenous nucleic acid is included in a microbial organism, the exogenous nucleic acids refer to the referenced encoding nucleic acid or biosynthetic activity, as exemplified above or below. It is further understood, as disclosed herein, that such exogenous nucleic acids can be introduced into the host microbial organism on separate nucleic acid molecules, on polycistronic nucleic acid molecules, or a combination thereof, and still be considered as more than one exogenous nucleic acid. For example, as disclosed herein a microbial organism can be engineered to express two or more exogenous nucleic acids encoding a desired pathway enzyme or protein. In the case where two exogenous nucleic acids encoding a desired activity are introduced into a host microbial organism, it is understood that the two exogenous nucleic acids can be introduced as a single nucleic acid, for example, on a single plasmid, on separate plasmids, can be integrated into the host chromosome at a single site or multiple sites, and still be considered as two exogenous nucleic acids. Similarly, it is understood that more than two exogenous nucleic acids can be introduced into a host organism in any desired combination, for example, on a single plasmid, on separate plasmids, which are not integrated into the host chromosome, and the plasmids remain as extra-chromosomal elements, and still be considered as two or more exogenous nucleic acids. The number of referenced exogenous nucleic acids or biosynthetic activities refers to the number of encoding nucleic acids or the number of biosynthetic activities, not the number of separate nucleic acids introduced into the host organism.

[0138] The non-naturally occurring microbial organisms can contain stable genetic alterations, which refers to microorganisms that can be cultured for greater than five generations without loss of the alteration. Generally, stable genetic alterations include modifications that persist greater than 10 generations, particularly stable modifications will persist more than about 25 generations, and more particularly, stable genetic modifications will be greater than 50 generations, including indefinitely.

[0139] In the case of gene disruptions, a particularly useful stable genetic alteration is a gene deletion. The use of a gene deletion to introduce a stable genetic alteration is particularly useful to reduce the likelihood of a reversion to a phenotype prior to the genetic alteration. For example, stable growth-coupled production of a biochemical can be achieved, for example, by deletion of a gene encoding an enzyme catalyzing one or more reactions within a set of metabolic modifications. The stability of growth-coupled production of a biochemical can be further enhanced through multiple deletions, significantly reducing the likelihood of multiple compensatory reversions occurring for each disrupted activity.

[0140] Those skilled in the art will understand that the genetic alterations, including metabolic modifications exemplified herein, are described with reference to a suitable host organism such as E. coli and their corresponding metabolic reactions or a suitable source organism for desired genetic material such as genes for a desired metabolic pathway. However, given the complete genome sequencing of a wide variety of organisms and the high level of skill in the area of genomics, those skilled in the art will readily be able to apply the teachings and guidance provided herein to essentially all other organisms. For example, the E. coli metabolic alterations exemplified herein can readily be applied to other species by incorporating the same or analogous encoding nucleic acid from species other than the referenced species. Such genetic alterations include, for example, genetic alterations of species homologs, in general, and in particular, orthologs, paralogs or nonorthologous gene displacements.

[0141] An ortholog is a gene or genes that are related by vertical descent and are responsible for substantially the same or identical functions in different organisms. For example, mouse epoxide hydrolase and human epoxide hydrolase can be considered orthologs for the biological function of hydrolysis of epoxides. Genes are related by vertical descent when, for example, they share sequence similarity of sufficient amount to indicate they are homologous, or related by evolution from a common ancestor. Genes can also be considered orthologs if they share three-dimensional structure but not necessarily sequence similarity, of a sufficient amount to indicate that they have evolved from a common ancestor to the extent that the primary sequence similarity is not identifiable. Genes that are orthologous can encode proteins with sequence similarity of about 25% to 100% amino acid sequence identity. Genes encoding proteins sharing an amino acid similarity less than 25% can also be considered to have arisen by vertical descent if their three-dimensional structure also shows similarities. Members of the serine protease family of enzymes, including tissue plasminogen activator and elastransaminasee, are considered to have arisen by vertical descent from a common ancestor.

[0142] Orthologs include genes or their encoded gene products that through, for example, evolution, have diverged in structure or overall activity. For example, where one species encodes a gene product exhibiting two functions and where such functions have been separated into distinct genes in a second species, the three genes and their corresponding products are considered to be orthologs. For the production of a biochemical product, those skilled in the art will understand that the orthologous gene harboring the metabolic activity to be introduced or disrupted is to be chosen for construction of the non-naturally occurring microorganism. An example of orthologs exhibiting separable activities is where distinct activities have been separated into distinct gene products between two or more species or within a single species. A specific example is the separation of elastransaminasee proteolysis and plasminogen proteolysis, two types of serine protease activity, into distinct molecules as plasminogen activator and elastransaminasee. A second example is the separation of mycoplasma 5′-3′ exonuclease and Drosophila DNA polymerase III activity. The DNA polymerase from the first species can be considered an ortholog to either or both of the exonuclease or the polymerase from the second species and vice versa.

[0143] In contrast, paralogs are homologs related by, for example, duplication followed by evolutionary divergence and have similar or common, but not identical functions. Paralogs can originate or derive from, for example, the same species or from a different species. For example, microsomal epoxide hydrolase (epoxide hydrolase I) and soluble epoxide hydrolase (epoxide hydrolase II) can be considered paralogs because they represent two distinct enzymes, co-evolved from a common ancestor, that catalyze distinct reactions and have distinct functions in the same species. Paralogs are proteins from the same species with significant sequence similarity to each other suggesting that they are homologous, or related through co-evolution from a common ancestor. Groups of paralogous protein families include HipA homologs, luciferase genes, peptidases, and others.

[0144] A nonorthologous gene displacement is a nonorthologous gene from one species that can substitute for a referenced gene function in a different species. Substitution includes, for example, being able to perform substantially the same or a similar function in the species of origin compared to the referenced function in the different species. Although generally, a nonorthologous gene displacement will be identifiable as structurally related to a known gene encoding the referenced function, less structurally related but functionally similar genes and their corresponding gene products nevertheless will still fall within the meaning of the term as it is used herein. Functional similarity requires, for example, at least some structural similarity in the active site or binding region of a nonorthologous gene product compared to a gene encoding the function sought to be substituted. Therefore, a nonorthologous gene includes, for example, a paralog or an unrelated gene.

[0145] Therefore, in identifying and constructing the non-naturally occurring microbial organisms having 6-aminocaproic acid, caprolactam, hexamethylenediamine or 1,6-hexanediol biosynthetic capability, those skilled in the art will understand with applying the teaching and guidance provided herein to a particular species that the identification of metabolic modifications can include identification and inclusion or inactivation of orthologs. To the extent that paralogs and/or nonorthologous gene displacements are present in the referenced microorganism that encode an enzyme catalyzing a similar or substantially similar metabolic reaction, those skilled in the art also can utilize these evolutionally related genes. In gene disruption strategies, evolutionally related genes can also be disrupted or deleted in a host microbial organism, paralogs or orthologs, to reduce or eliminate activities to ensure that any functional redundancy in enzymatic activities targeted for disruption do not short circuit the designed metabolic modifications.

[0146] Orthologs, paralogs and nonorthologous gene displacements can be determined by methods well known to those skilled in the art. For example, inspection of nucleic acid or amino acid sequences for two polypeptides will reveal sequence identity and similarities between the compared sequences. Based on such similarities, one skilled in the art can determine if the similarity is sufficiently high to indicate the proteins are related through evolution from a common ancestor. Algorithms well known to those skilled in the art, such as Align, BLAST, Clustal W and others compare and determine a raw sequence similarity or identity, and also determine the presence or significance of gaps in the sequence which can be assigned a weight or score. Such algorithms also are known in the art and are similarly applicable for determining nucleotide sequence similarity or identity. Parameters for sufficient similarity to determine relatedness are computed based on well-known methods for calculating statistical similarity, or the chance of finding a similar match in a random polypeptide, and the significance of the match determined. A computer comparison of two or more sequences can, if desired, also be optimized visually by those skilled in the art. Related gene products or proteins can be expected to have a high similarity, for example, 25% to 100% sequence identity. Proteins that are unrelated can have an identity which is essentially the same as would be expected to occur by chance, if a database of sufficient size is scanned (about 5%). Sequences between 5% and 24% may or may not represent sufficient homology to conclude that the compared sequences are related. Additional statistical analysis to determine the significance of such matches given the size of the data set can be carried out to determine the relevance of these sequences.

[0147] Exemplary paramemeters for determining relatedness of two or more sequences using the BLAST algorithm, for example, can be as set forth below. Briefly, amino acid sequence alignments can be performed using BLASTP version 2. 2. 29+ (Jan. 14, 2014) and the following parameTransaminase: Matrix: 0 BLOSUM62; gap open: 11; gap extension: 1; x_dropoff: 50; expect: 10. 0; wordsize: 3; filter: on. Nucleic acid sequence alignments can be performed using BLASTN version 2. 0. 6 (Sep. 16, 1998) and the following parameTransaminase: Match: 1; mismatch: −2; gap open: 5; gap extension: 2; x_dropoff: 50; expect: 10. 0; wordsize: 11; filter: off. Those skilled in the art will know what modifications can be made to the above parameTransaminase to either increase or decrease the stringency of the comparison, for example, and determine the relatedness of two or more sequences.

[0148] It is understood that any of the pathways disclosed herein, including those as described in the Figures can be used to generate a non-naturally occurring microbial organism that produces any pathway intermediate or product, as desired. As disclosed herein, such a microbial organism that produces an intermediate can be used in combination with another microbial organism expressing downstream pathway enzymes to produce a desired product. However, it is understood that a non-naturally occurring microbial organism that produces a 6-aminocaproic acid, caprolactam, hexamethylenediamine or 1,6-hexanediol pathway intermediate can be utilized to produce the intermediate as a desired product.

[0149] Described herein with general reference to the metabolic reaction, reactant or product thereof, or with specific reference to one or more nucleic acids or genes encoding an enzyme associated with or catalyzing the referenced metabolic reaction, reactant or product. Unless otherwise expressly stated herein, those skilled in the art will understand that reference to a reaction also constitutes reference to the reactants and products of the reaction. Similarly, unless otherwise expressly stated herein, reference to a reactant or product also references the reaction, and reference to any of these metabolic constituents also references the gene or genes encoding the enzymes that catalyze the referenced reaction, reactant or product. Likewise, given the well-known fields of metabolic biochemistry, enzymology and genomics, reference herein to a gene or encoding nucleic acid also constitutes a reference to the corresponding encoded enzyme and the reaction it catalyzes as well as the reactants and products of the reaction.

[0150] The non-naturally occurring microbial organisms can be produced by introducing expressible nucleic acids encoding one or more of the enzymes participating in one or more 6-aminocaproic acid, caprolactam, hexamethylenediamine or 1,6-hexanediol biosynthetic pathways. Depending on the host microbial organism chosen for biosynthesis, nucleic acids for some or all of a particular 6-aminocaproic acid, caprolactam, hexamethylenediamine or 1,6-hexanediol biosynthetic pathway can be expressed. For example, if a chosen host is deficient in one or more enzymes for a desired biosynthetic pathway, then expressible nucleic acids for the deficient enzyme(s) are introduced into the host for subsequent exogenous expression. Alternatively, if the chosen host exhibits endogenous expression of some pathway genes, but is deficient in others, then an encoding nucleic acid is needed for the deficient enzyme(s) to achieve 6-aminocaproic acid, caprolactam, hexamethylenediamine or 1,6-hexanediol biosynthesis. Thus, a non-naturally occurring microbial organism can be produced by introducing exogenous enzyme activities to obtain a desired biosynthetic pathway or a desired biosynthetic pathway can be obtained by introducing one or more exogenous enzyme activities that, together with one or more endogenous enzymes, produce a desired product such as 6-aminocaproic acid, caprolactam, hexamethylenediamine or 1,6-hexanediol.

[0151] Depending on the 6-aminocaproic acid, caprolactam, hexamethylenediamine or 1,6-hexanediol biosynthetic pathway constituents of a selected host microbial organism, the non-naturally occurring microbial organisms will include at least one exogenously expressed 6-aminocaproic acid, caprolactam, hexamethylenediamine or 1,6-hexanediol pathway-encoding nucleic acid and up to all encoding nucleic acids for one or more adipate, 6-aminocaproic acid or caprolactam biosynthetic pathways. For example, 6-aminocaproic acid, caprolactam, hexamethylenediamine or 1,6-hexanediol biosynthesis can be established in a host deficient in a pathway enzyme through exogenous expression of the corresponding encoding nucleic acid. In a host deficient in all enzymes of a 6-aminocaproic acid, caprolactam, hexamethylenediamine or 1,6-hexanediol pathway, exogenous expression of all enzymes in the pathway can be included, although it is understood that all enzymes of a pathway can be expressed even if the host contains at least one of the pathway enzymes.

[0152] Given the teachings and guidance provided herein, those skilled in the art will understand that the number of encoding nucleic acids to introduce in an expressible form will, at least, parallel the adipate, 6-aminocaproic acid, caprolactam, hexamethylenediamine or 1,6-hexanediol pathway deficiencies of the selected host microbial organism. Therefore, a non-naturally occurring microbial organism can have at least one, two, three, four, five, six, seven, eight, nine, ten, eleven or twelve, up to all nucleic acids encoding the above enzymes constituting a 6-aminocaproic acid, caprolactam, hexamethylenediamine or 1,6-hexanediol biosynthetic pathway. In some embodiments, the non-naturally occurring microbial organisms also can include other genetic modifications that facilitate or optimize 6-aminocaproic acid, caprolactam, hexamethylenediamine or 1,6-hexanediol biosynthesis or that confer other useful functions onto the host microbial organism. One such other functionality can include, for example, augmentation of the synthesis of one or more of the 6-aminocaproic acid, caprolactam, hexamethylenediamine or 1,6-hexanediol pathway precursors such as succinyl-CoA and/or acetyl-CoA in the case of adipate synthesis, or adipyl-CoA or adipate in the case of 6-aminocaproic acid, caprolactam or HMID synthesis, including the adipate pathway enzymes disclosed herein, or pyruvate and succinic semialdehyde, glutamate, glutaryl-CoA, homolysine or 2-amino-7-oxosubarate in the case of 6-aminocaprioate synthesis, or 6-aminocaproate, glutamate, glutaryl-CoA, pyruvate and 4-aminobutanal, or 2-amino-7-oxosubarate in the case of hexamethylenediamine synthesis.

[0153] In some embodiments, a non-naturally occurring microbial organism has at least one exogenous nucleic acid encoding a transaminase that reacts with adipate semialdhyde to form 6ACA and selected from transaminases comprising the amino acid sequences having at least about 50% amino acid sequence identity to at least 25, 50, 75, 100, 150, 200, 250, 300, or more contiguous amino acids of any of any of SEQ ID NOs: 1, 3, 4, 5, 9, 12, 13, 26, 27, 30, 31, 38, 50, 52, 64, 74, 78, 79, 81, 91, 106, 108, and 116.

[0154] In some embodiments, a non-naturally occurring microbial organism has at least one exogenous nucleic acid encoding a CAR that reacts with 6ACA to form 6-aminocaproate semialdehyde and selected from CARs comprising the amino acid sequences having at least about 50% sequence identity to at least 25, 50, 75, 100, 150, 200, 250, 300, or more contiguous amino acids of any of SEQ ID NOS:150-165, 168-171, 173-178, 180, 183-185, 187-188, 190-193, 195, 198-200, 202-216, 218-219, 221-230, 232-238, 241-244, 246-249, 251-252 and 255-264.

[0155] In some embodiments, a non-naturally occurring microbial organism has at least one exogenous nucleic acid encoding a CAR that reacts with 6ACA to form 6-aminocaproate semialdehyde and selected from CARs comprising the amino acid sequences having at least about 50% sequence identity to at least 25, 50, 75, 100, 150, 200, 250, 300, or more contiguous amino acids of any of SEQ ID NOS: 265 and 267-296.

[0156] Generally, a host microbial organism is selected such that it produces the precursor of a 6-aminocaproic acid, caprolactam, hexamethylenediamine or 1,6-hexanediol pathway, either as a naturally produced molecule or as an engineered product that either provides de novo production of a desired precursor or increased production of a precursor naturally produced by the host microbial organism. A host organism can be engineered to increase production of a precursor, as disclosed herein. In addition, a microbial organism that has been engineered to produce a desired precursor can be used as a host organism and further engineered to express enzymes or proteins of a 6-aminocaproic acid, caprolactam, hexamethylenediamine or 1,6-hexanediol pathway.

[0157] In some embodiments, a non-naturally occurring microbial organism is generated from a host that contains the enzymatic capability to synthesize 6-aminocaproic acid, caprolactam, hexamethylenediamine or 1,6-hexanediol. In this specific embodiment it can be useful to increase the synthesis or accumulation of a 6-aminocaproic acid, caprolactam, hexamethylenediamine or 1,6-hexanediol pathway product to, for example, drive 6-aminocaproic acid, caprolactam, hexamethylenediamine or 1,6-hexanediol pathway reactions toward 6-aminocaproic acid, caprolactam, hexamethylenediamine or 1,6-hexanediol production. Increased synthesis or accumulation can be accomplished by, for example, overexpression of nucleic acids encoding one or more of the above-described 6-aminocaproic acid, caprolactam, hexamethylenediamine or 1,6-hexanediol pathway enzymes. Over expression of the 6-aminocaproic acid, caprolactam, hexamethylenediamine or 1,6-hexanediol pathway enzyme or enzymes can occur, for example, through exogenous expression of the endogenous gene or genes, or through exogenous expression of the heterologous gene or genes. Therefore, naturally occurring organisms can be readily generated to be non-naturally occurring microbial organisms, for example, producing 6-aminocaproic acid, caprolactam, hexamethylenediamine or 1,6-hexanediol, through overexpression of at least one, two, three, four, five, six, seven, eight, nine, ten, eleven, twelve, thirteen, fourteen, that is, up to all nucleic acids encoding 6-aminocaproic acid, caprolactam, hexamethylenediamine or 1,6-hexanediol biosynthetic pathway enzymes. In addition, a non-naturally occurring organism can be generated by mutagenesis of an endogenous gene that results in an increase in activity of an enzyme in the 6-aminocaproic acid, caprolactam, hexamethylenediamine or 1,6-hexanediol biosynthetic pathway.

[0158] In particularly useful embodiments, exogenous expression of the encoding nucleic acids is employed. Exogenous expression confers the ability to custom tailor the expression and/or regulatory elements to the host and application to achieve a desired expression level that is controlled by the user. However, endogenous expression also can be utilized in other embodiments such as by removing a negative regulatory effector or induction of the gene's promoter when linked to an inducible promoter or other regulatory element. Thus, an endogenous gene having a naturally occurring inducible promoter can be up-regulated by providing the appropriate inducing agent, or the regulatory region of an endogenous gene can be engineered to incorporate an inducible regulatory element, thereby allowing the regulation of increased expression of an endogenous gene at a desired time. Similarly, an inducible promoter can be included as a regulatory element for an exogenous gene introduced into a non-naturally occurring microbial organism.

[0159] In some embodiments, a non-naturally occurring microbial organism includes one or more gene disruptions, where the organism produces a 6-ACA, adipate and/or HMD. The disruptions occur in genes encoding an enzyme that couples production of adipate, 6-ACA and/or HMD to growth of the organism when the gene disruption reduces the activity of the enzyme, such that the gene disruptions confer increased production of adipate, 6-ACA and/or HMD onto the non-naturally occurring organism. Thus, in some embodiments is provided a non-naturally occurring microbial organism, comprising one or more gene disruptions, the one or more gene disruptions occurring in genes encoding proteins or enzymes wherein the one or more gene disruptions confer increased production of adipate, 6-ACA and/or HMD in the organism. As disclosed herein, such an organism contains a pathway for production of adipate, 6-ACA and/or HMD.

[0160] It is understood that, in methods, any of the one or more exogenous nucleic acids can be introduced into a microbial organism to produce a non-naturally occurring microbial organism. The nucleic acids can be introduced so as to confer, for example, a 6-aminocaproic acid, caprolactam, hexamethylenediamine or 1,6-hexanediol biosynthetic pathway onto the microbial organism. Alternatively, encoding nucleic acids can be introduced to produce an intermediate microbial organism having the biosynthetic capability to catalyze some of the required reactions to confer 6-aminocaproic acid, caprolactam, hexamethylenediamine or 1,6-hexanediol biosynthetic capability. For example, a non-naturally occurring microbial organism having a 6-aminocaproic acid, caprolactam, hexamethylenediamine or 1,6-hexanediol biosynthetic pathway can comprise at least two exogenous nucleic acids encoding desired enzymes. In the case of adipate production, at least two exogenous nucleic acids can encode the enzymes such as the combination of succinyl-CoA: acetyl-CoA acyl transferase and 3-hydroxyacyl-CoA dehydrogenase, or succinyl-CoA: acetyl-CoA acyl transferase and 3-hydroxyadipyl-CoA dehydratransaminasee, or 3-hydroxyadipyl-CoA and adipate semialdehyde transaminase, or 3-hydroxyacyl-CoA and adipyl-CoA synthetase, and the like. In the case of caprolactam production, at least two exogenous nucleic acids can encode the enzymes such as the combination of CoA-dependent trans-enoyl-CoA reductase and transaminase, or CoA-dependent trans-enoyl-CoA reductransaminasee and amidohydrolase, or transaminase and amidohydrolase. In the case of 6-aminocaproic acid production, at least two exogenous nucleic acids can encode the enzymes such as the combination of an 4-hydroxy-2-oxoheptane-1,7-dioate (HODH) TAolase and a 2-oxohept-4-ene-1,7-dioate (OHED) hydratransaminasee, or a 2-oxohept-4-ene-1,7-dioate (OHED) hydratransaminasee and a 2-aminoheptane-1,7-dioate (2-AHD) decarboxylase, a 3-hydroxyadipyl-CoA dehydratransaminasee and a adipyl-CoA dehydrogenase, a glutamyl-CoA transferase and a 6-aminopimeloyl-CoA hydrolase, or a glutaryl-CoA beta-ketothiolase and a 3-aminopimelate 2,3-aminomutransaminasee. In the case of hexamethylenediamine production, at least two exogenous nucleic acids can encode the enzymes such as the combination of 6-aminocaproate kinase and [(6-aminohexanoyl)oxy]phosphonate (6-AHOP) oxidoreductransaminasee, or a 6-acetamidohexanoate kinase and an [(6-acetamidohexanoyl)oxy]phosphonate (6-AAHOP) oxidoreductransaminasee, 6-aminocaproate N-acetyltransferase and 6-acetamidohexanoyl-CoA oxidoreductransaminasee, a 3-hydroxy-6-aminopimeloyl-CoA dehydratransaminasee and a 2-amino-7-oxoheptanoate aminotransferase, or a 3-oxopimeloyl-CoA ligase and a homolysine decarboxylase. Thus, it is understood that any combination of two or more enzymes of a biosynthetic pathway can be included in a non-naturally occurring microbial organism. In the case of 6ACA, 6-aminocaproate semialdehyde or HMD, by reference to FIG. 10, at least two exogenous nucleic acids can encode the enzymes such as the combination of enzymes represented by steps 10A and 10B, 10B and 10C, 10C and 10D, 10D and 10E, 10E and 10F, 10F and 10I and/or 10I and 10J, or any combination thereof of two, three, four, five, six, seven and/or eight of the enzymes represented by steps 10A, 10B, 10C, 10D, 10E, 10F, 10I and/or 10J.

[0161] Similarly, it is understood that any combination of three or more enzymes of a biosynthetic pathway can be included in a non-naturally occurring microbial organism, for example, in the case of adipate production, the combination of enzymes succinyl-CoA: acetyl-CoA acyl transferase, 3-hydroxyacyl-CoA dehydrogenase, and 3-hydroxyadipyl-CoA dehydratransaminasee; or succinyl-CoA: acetyl-CoA acyl transferase, 3-hydroxyacyl-CoA dehydrogenase andadipate semialdehydereductransaminasee; or succinyl-CoA: acetyl-CoA acyl transferase, 3-hydroxyacyl-CoA dehydrogenase and adipyl-CoA synthetransaminasee; or 3-hydroxyacyl-CoA dehydrogenase, 3-hydroxyadipyl-CoA dehydratransaminasee and adipyl-CoA: acetyl-CoA transferase, and so forth, as desired, so long as the combination of enzymes of the desired biosynthetic pathway results in production of the corresponding desired product. In the case of 6-aminocaproic acid production, the at least three exogenous nucleic acids can encode the enzymes such as the combination of an 4-hydroxy-2-oxoheptane-1,7-dioate (HODH) TAolase, a 2-oxohept-4-ene-1,7-dioate (OHED) hydratransaminasee and a 2-oxoheptane-1,7-dioate (2-OHD) decarboxylase, or a 2-oxohept-4-ene-1,7-dioate (OHED) hydratransaminasee, a 2-aminohept-4-ene-1,7-dioate (2-AHE) reductransaminasee and a 2-aminoheptane-1,7-dioate (2-AHD) decarboxylase, or a 3-hydroxyadipyl-CoA dehydratransaminasee, 2,3-dehydroadipyl-CoA reductransaminasee and a adipyl-CoA dehydrogenase, or a 6-amino-7-carboxyhept-2-enoyl-CoA reductransaminasee, a 6-aminopimeloyl-CoA hydrolase and a 2-aminopimelate decarboxylase, or a glutaryl-CoA beta-ketothiolase, a 3-aminating oxidoreductransaminasee and a 2-aminopimelate decarboxylase, or a 3-oxoadipyl-CoA thiolase, a 5-carboxy-2-pentenoate reductransaminasee and a adipate reductransaminasee. In the case of hexamethylenediamine production, at least three exogenous nucleic acids can encode the enzymes such as the combination of 6-aminocaproate kinase, [(6-aminohexanoyl)oxy]phosphonate (6-AHOP) oxidoreductransaminasee and 6-aminocaproic semialdehyde aminotransferase, or a 6-aminocaproate N-acetyltransferase, a 6-acetamidohexanoate kinase and an [(6-acetamidohexanoyl)oxy]phosphonate (6-AAHOP) oxidoreductransaminasee, or 6-aminocaproate N-acetyltransferase, a [(6-acetamidohexanoyl)oxy]phosphonate (6-AAHOP) acyltransferase and 6-acetamidohexanoyl-CoA oxidoreductransaminasee, or a 3-oxo-6-aminopimeloyl-CoA oxidoreductransaminasee, a 3-hydroxy-6-aminopimeloyl-CoA dehydratransaminasee and a homolysine decarboxylase, or a 2-oxo-4-hydroxy-7-aminoheptanoate TAolase, a 2-oxo-7-aminohept-3-enoate reductransaminasee and a homolysine decarboxylase, or a 6-acetamidohexanoate reductransaminasee, a 6-acetamidohexanal aminotransferase and a 6-acetamidohexanamine N-acetyltransferase. In the case of 6ACA, 6-aminocaproate semialdehyde or HMD, by reference to FIG. 10, at least three exogenous nucleic acids can encode the enzymes such as the combination of enzymes represented by steps 10A, 10B and 10C; 10B, 10C and 10D; 10C, 10D and 10E; 10D, 10E and 10F; 10E, 10F and/or 10I; 10F, 10I and 10J, or any combination thereof of three, four, five, six, seven and/or eight of the enzymes represented by steps 10A, 10B, 10C, 10D, 10E, 10F, 10I and/or 10J. Similarly, any combination of four or more enzymes of a biosynthetic pathway as disclosed herein can be included in a non-naturally occurring microbial organism, as desired, so long as the combination of enzymes of the desired biosynthetic pathway results in production of the corresponding desired product.

[0162] In addition to the biosynthesis of 6-aminocaproic acid, caprolactam, hexamethylenediamine or 1,6-hexanediol as described herein, the non-naturally occurring microbial organisms and methods also can be utilized in various combinations with each other and with other microbial organisms and methods well known in the art to achieve product biosynthesis by other routes. For example, one alternative to produce 6-aminocaproic acid, caprolactam, hexamethylenediamine or 1,6-hexanediol other than use of the 6-aminocaproic acid, caprolactam, hexamethylenediamine or 1,6-hexanediol producers is through addition of another microbial organism capable of converting an adipate, 6-aminocaproic acid or caprolactam pathway intermediate to 6-aminocaproic acid, caprolactam, hexamethylenediamine or 1,6-hexanediol. One such procedure includes, for example, the fermentation of a microbial organism that produces a 6-aminocaproic acid, caprolactam, hexamethylenediamine or 1,6-hexanediol pathway intermediate. The 6-aminocaproic acid, caprolactam, hexamethylenediamine or 1,6-hexanediol pathway intermediate can then be used as a substrate for a second microbial organism that converts the 6-aminocaproic acid, caprolactam, hexamethylenediamine or 1,6-hexanediol pathway intermediate to 6-aminocaproic acid, caprolactamor hexamethylenediamine. The 6-aminocaproic acid, caprolactam, hexamethylenediamine or 1,6-hexanediol pathway intermediate can be added directly to another culture of the second organism or the original culture of 6-aminocaproic acid, caprolactam, hexamethylenediamine or 1,6-hexanediol pathway intermediate producers can be depleted of these microbial organisms by, for example, cell separation, and then subsequent addition of the second organism to the fermentation broth can be utilized to produce the final product without intermediate purification steps.

[0163] In other embodiments, the non-naturally occurring microbial organisms and methods can be assembled in a wide variety of sub pathways to achieve biosynthesis of, for example, 6-aminocaproic acid, caprolactam, hexamethylenediamine or 1,6-hexanediol. In these embodiments, biosynthetic pathways for a desired product can be segregated into different microbial organisms, and the different microbial organisms can be co-cultured to produce the final product. In such a biosynthetic scheme, the product of one microbial organism is the substrate for a second microbial organism until the final product is synthesized. For example, the biosynthesis of 6-aminocaproic acid, caprolactam, hexamethylenediamine or 1,6-hexanediol can be accomplished by constructing a microbial organism that contains biosynthetic pathways for conversion of one pathway intermediate to another pathway intermediate or the product. Alternatively, 6-aminocaproic acid, caprolactam, hexamethylenediamine or 1,6-hexanediol also can be biosynthetically produced from microbial organisms through co-culture or co-fermentation using two organisms in the same vessel, where the first microbial organism produces a 6-aminocaproic acid, caprolactam, hexamethylenediamine or 1,6-hexanediol intermediate and the second microbial organism converts the intermediate to 6-aminocaproic acid, caprolactam, hexamethylenediamine or 1,6-hexanediol.

[0164] Given the teachings and guidance provided herein, those skilled in the art will understand that a wide variety of combinations and permutations exist for the non-naturally occurring microbial organisms and methods together with other microbial organisms, with the co-culture of other non-naturally occurring microbial organisms having sub pathways and with combinations of other chemical and/or biochemical procedures well known in the art to produce 6-aminocaproic acid, caprolactam, hexamethylenediamine or 1,6-hexanediol.

[0165] Similarly, it is understood by those skilled in the art that a host organism can be selected based on desired characteristics for introduction of one or more gene disruptions to increase production of 6-aminocaproic acid, caprolactam, hexamethylenediamine or 1,6-hexanediol. Thus, it is understood that, if a genetic modification is to be introduced into a host organism to disrupt a gene, any homologs, orthologs or paralogs that catalyze similar, yet non-identical metabolic reactions can similarly be disrupted to ensure that a desired metabolic reaction is sufficiently disrupted. Because certain differences exist among metabolic networks between different organisms, those skilled in the art will understand that the actual genes disrupted in a given organism may differ between organisms. However, given the teachings and guidance provided herein, those skilled in the art also will understand that the methods can be applied to any suitable host microorganism to identify the cognate metabolic alterations needed to construct an organism in a species of interest that will increase 6-aminocaproic acid, caprolactam, hexamethylenediamine or 1,6-hexanediol biosynthesis. In a particular embodiment, the increased production couples biosynthesis of 6-aminocaproic acid, caprolactam, hexamethylenediamine or 1,6-hexanediol to growth of the organism, and can obligatorily couple production of 6-aminocaproic acid, caprolactam, hexamethylenediamine or 1,6-hexanediol to growth of the organism if desired and as disclosed herein.

[0166] Sources of encoding nucleic acids for a 6-aminocaproic acid, caprolactam, hexamethylenediamine or 1,6-hexanediol pathway enzyme can include, for example, any species where the encoded gene product is capable of catalyzing the referenced reaction. Such species include both prokaryotic and eukaryotic organisms including, but not limited to, bacteria, including archaea and eubacteria, and eukaryotes, including yeast, plant, insect, animal, and mammal, including human. In some embodiments, the source of the encoding nucleic acids for a 6-aminocaproic acid, caprolactam, hexamethylenediamine or 1,6-hexanediol pathway enzyme is shown in Tables 6, 8 and 11. In some embodiments, the source of the encoding nucleic acids for transaminase enzyme is shown in Table 6. In some embodiments, the source of the encoding nucleic acids for transaminase enzyme is from the genus Achromobacter, Acidaminococcus, Collinsella, Peptostreptococcaceae, Paenarthrobacter or Romboustsia. In some embodiments, the source of the encoding nucleic acids for a 6-aminocaproic acid, caprolactam, hexamethylenediamine or 1,6-hexanediol pathway enzyme are species such as, Escherichia coli, Escherichia coli str. K12, Escherichia coli C, Escherichia coli W, Pseudomonas sp, Pseudomonas knackmussii, Pseudomonas sp. Strain B13, Pseudomonas putida, Pseudomonas fluorescens, Pseudomonas stutzeri, Pseudomonas mendocina, Rhodopseudomonas palustris, Mycobacterium tuberculosis, Vibrio cholera, Heliobacter pylori, Klebsiella pneumoniae, Serratia proteamaculans, Streptomyces sp. 2065, Pseudomonas aeruginosa, Pseudomonas aeruginosa PAO1, Ralstonia eutropha, Ralstonia eutropha H16, Clostridium acetobutylicum, Euglena gracilis, Treponema denticola, Clostridium kluyveri, Homo sapiens, Rattus norvegicus, Acinetobacter sp. ADP1, Acinetobacter sp. Strain M-1, Streptomyces coelicolor, Eubacterium barkeri, Peptostreptococcus asaccharolyticus, Clostridium botulinum, Clostridium botulinum A3 str, Clostridium tyrobutyricum, Clostridium pasteurianum, Clostridium thermoaceticum (Moorella thermoaceticum), Moorella thermoacetica Acinetobacter calcoaceticus, Mus musculus, Sus scrofa, Flavobacterium sp, Arthrobacter aurescens, Penicillium chrysogenum, Aspergillus niger, Aspergillus nidulans, Bacillus subtilis, Saccharomyces cerevisiae, Zymomonas mobilis, Mannheimia succiniciproducens, Clostridium ljungdahlii, Clostridium carboxydivorans, Geobacillus stearothermophilus, Agrobacterium tumefaciens, Achromobacter xylosoxidans, Achromobacter denitrificans, Arabidopsis thaliana, Haemophilus influenzae, Acidaminococcus fermentans, Clostridium sp. M62/1, Fusobacterium nucleatum, Bos taurus, Zoogloea ramigera, Rhodobacter sphaeroides, Clostridium beijerinckii, Metallosphaera sedula, Thermoanaerobacter species, Thermoanaerobacter brockii, Acinetobacter baylyi, Porphyromonas gingivalis, Leuconostoc mesenteroides, Sulfolobus tokodaii, Sulfolobus tokodaii 7, Sulfolobus solfataricus, Sulfolobus solfataricus, Sulfolobus acidocaldarius, Salmonella typhimurium, Salmonella enterica, Thermotoga maritima, Halobacterium salinarum, Bacillus cereus, Clostridium difficile, Alkaliphilus metalliredigenes, Thermoanaerobacter tengcongensis, Saccharomyces kluyveri, Helicobacter pylori, Corynebacterium glutamicum, Clostridium saccharoperbutylacetonicum, Pseudomonas chlororaphis, Streptomyces clavuligerus, Campylobacter jejuni, Thermus thermophilus, Pelotomaculum thermopropionicum, Bacteroides capillosus, Anaerotruncus colihominis, Natranaerobius thermophilius, Archaeoglobus fulgidus, Archaeoglobus fulgidus DSM 4304, Haloarcula marismortui, Pyrobaculum aerophilum, Pyrobaculum aerophilum str. IM2, Nicotiana tabacum, Menthe piperita, Pinus taeda, Hordeum vulgare, Zea mays, Rhodococcus opacus, Cupriavidus necator, Bradyrhizobium japonicum, Bradyrhizobium japonicum USDA110, Ascarius suum, butyrate-producing bacterium L2-50, Bacillus megaterium, Methanococcus maripaludis, Methanosarcina mazei, Methanosarcina mazei, Methanocarcina barkeri, Methanocaldococcus jannaschii, Caenorhabditis elegans, Leishmania major, Methylomicrobium alcaliphilum 20Z, Chromohalobacter salexigens, Archaeglubus fulgidus, Chlamydomonas reinhardtii, Trichomonas vaginalis G3, Trypanosoma brucei, Mycoplana ramose, Micrococcus luteas, Acetobacter pasteurians, Kluyveromyces lactis, Mesorhizobium loti, Lactococcus lactis, Lysinibacillus sphaericus, Candida boidinii, Candida albicans SC5314, Burkholderia ambifaria AMMD, Ascaris suun, Acinetobacter baumanii, Acinetobacter calcoaceticus, Burkholderia phymatum, Candida albicans, Clostridium subterminale, Cupriavidus taiwanensis, Flavobacterium lutescens, Lachancea kuyveri, Lactobacillus sp. 30a, Leptospira interrogans, Moorella thermoacetica, Myxococcus xanthus, Nicotiana glutinosa, Nocardia iowensis (sp. NRRL 5646), Pseudomonas reinekei MT1, Ralstonia eutropha JMP134, Ralstonia metallidurans, Rhodococcus jostii, Schizosaccharomyces pombe, Selenomonas ruminantium, Streptomyces clavuligenus, Syntrophus aciditrophicus, Vibrio parahaemolyticus, Vibrio vulrificus, as well as other exemplary species disclosed herein or available as source organisms for corresponding genes (see Examples). However, with the complete genome sequence available for now more than 550 species (with more than half of these available on public databases such as the NCBI), including 395 microorganism genomes and a variety of yeast, fungi, plant, and mammalian genomes, the identification of genes encoding the requisite 6-aminocaproic acid, caprolactam, hexamethylenediamine or 1,6-hexanediol biosynthetic activity for one or more genes in related or distant species, including for example, homologues, orthologs, paralogs and nonorthologous gene displacements of known genes, and the interchange of genetic alterations between organisms is routine and well known in the art. Accordingly, the metabolic alterations enabling biosynthesis of 6-aminocaproic acid, caprolactam, hexamethylenediamine or 1,6-hexanediol described herein with reference to a particular organism such as E. coli can be readily applied to other microorganisms, including prokaryotic and eukaryotic organisms alike. Given the teachings and guidance provided herein, those skilled in the art will know that a metabolic alteration exemplified in one organism can be applied equally to other organisms.

[0167] In some instances, such as when a 6-aminocaproic acid, caprolactam, hexamethylenediamine or 1,6-hexanediol biosynthetic pathway exists in an unrelated species, 6-aminocaproic acid, caprolactam, hexamethylenediamine or 1,6-hexanediol biosynthesis can be conferred onto the host species by, for example, exogenous expression of a paralog or paralogs from the unrelated species that catalyzes a similar, yet non-identical metabolic reaction to replace the referenced reaction. Because certain differences among metabolic networks exist between different organisms, those skilled in the art will understand that the actual gene usage between different organisms may differ. However, given the teachings and guidance provided herein, those skilled in the art also will understand that the teachings and methods can be applied to all microbial organisms using the cognate metabolic alterations to those exemplified herein to construct a microbial organism in a species of interest that will synthesize 6-aminocaproic acid, caprolactam, hexamethylenediamine or 1,6-hexanediol.

[0168] Host microbial organisms can be selected from, and the non-naturally occurring microbial organisms generated in, for example, bacteria, yeast, fungus or any of a variety of other microorganisms applicable to fermentation processes. Exemplary bacteria include species selected from Escherichia coli, Klebsiella oxytoca, Anaerobiospirillum succiniciproducens, Actinobacillus succinogenes, Mannheimia succiniciproducens, Rhizobium etli, Bacillus subtilis, Corynebacterium glutamicum, Gluconobacter oxydans, Zymomonas mobilis, Lactococcus lactis, Lactobacillus plantarum, Streptomyces coelicolor, Clostridium acetobutylicum, Pseudomonas fluorescens, and Pseudomonas putida. Exemplary yeasts or fungi include species selected from Saccharomyces cerevisiae, Schizosaccharomyces pombe, Kluyveromyces lactis, Kluyveromyces marxianus, Aspergillus terreus, Aspergillus niger, Pichia pastoris, Rhizopus arrhizus, Rhizopus oryzae, and the like. For example, E. coli is a particularly useful host organism since it is a well characterized microbial organism suitable for genetic engineering. Other particularly useful host organisms include yeast such as Saccharomyces cerevisiae. It is understood that any suitable microbial host organism can be used to introduce metabolic and/or genetic modifications to produce a desired product.

[0169] Methods for constructing and testing the expression levels of a non-naturally occurring 6-aminocaproic acid, caprolactam, hexamethylenediamine or 1,6-hexanediol-producing host can be performed, for example, by recombinant and detection methods well known in the art. Such methods can be found described in, for example, Sambrook et al., Molecular Cloning: A Laboratory Manual, Third Ed., Cold Spring Harbor Laboratory, New York (2001); and Ausubel et al., Current Protocols in Molecular Biology, John Wiley and Sons, Baltimore, MD (1999).

[0170] Exogenous nucleic acid sequences involved in a pathway for production of 6-aminocaproic acid, caprolactam, hexamethylenediamine or 1,6-hexanediol can be introduced stably or transiently into a host cell using techniques well known in the art including, but not limited to, conjugation, electroporation, chemical transformation, transduction, transfection, and ultrasound transformation. For exogenous expression in E. coli or other prokaryotic cells, some nucleic acid sequences in the genes or cDNAs of eukaryotic nucleic acids can encode targeting signals such as an N-terminal mitochondrial or other targeting signal, which can be removed before transformation into prokaryotic host cells, if desired. For example, removal of a mitochondrial leader sequence led to increased expression in E. coli (Hoffmeister et al., J. Biol. Chem. 280:4329-4338 (2005). For exogenous expression in yeast or other eukaryotic cells, genes can be expressed in the cytosol without the addition of leader sequence, or can be targeted to mitochondrion or other organelles, or targeted for secretion, by the addition of a suitable targeting sequence such as a mitochondrial targeting or secretion signal suitable for the host cells. Thus, it is understood that appropriate modifications to a nucleic acid sequence to remove or include a targeting sequence can be incorporated into an exogenous nucleic acid sequence to impart desirable properties. Furthermore, genes can be subjected to codon optimization with techniques well known in the art to achieve optimized expression of the proteins.

[0171] An expression vector or vectors can be constructed to include one or more 6-aminocaproic acid, caprolactam, hexamethylenediamine or 1,6-hexanediol biosynthetic pathway encoding nucleic acids as exemplified herein operably linked to expression control sequences functional in the host organism. Expression vectors applicable for use in the microbial host organisms include, for example, plasmids, phage vectors, viral vectors, episomes and artificial chromosomes, including vectors and selection sequences or markers operable for stable integration into a host chromosome. Additionally, the expression vectors can include one or more selectable marker genes and appropriate expression control sequences. Selectable marker genes also can be included that, for example, provide resistance to antibiotics or toxins, complement auxotrophic deficiencies, or supply critical nutrients not in the culture media. Expression control sequences can include constitutive and inducible promoTransaminase, transcription enhancers, transcription terminators, and the like which are well known in the art. When two or more exogenous encoding nucleic acids are to be co-expressed, both nucleic acids can be inserted, for example, into a single expression vector or in separate expression vectors. For single vector expression, the encoding nucleic acids can be operationally linked to one common expression control sequence or linked to different expression control sequences, such as one inducible promoter and one constitutive promoter. The transformation of exogenous nucleic acid sequences involved in a metabolic or synthetic pathway can be confirmed using methods well known in the art. Such methods include, for example, nucleic acid analysis such as Northern blots or polymerase chain reaction (PCR) amplification of mRNA, or immunoblotting for expression of gene products, or other suitable analytical methods to test the expression of an introduced nucleic acid sequence or its corresponding gene product. It is understood by those skilled in the art that the exogenous nucleic acid is expressed in a sufficient amount to produce the desired product, and it is further understood that expression levels can be optimized to obtain sufficient expression using methods well known in the art and as disclosed herein.

[0172] In some embodiments are methods for producing a desired intermediate or product such as adipate, 6-aminocaproic acid, caprolactam, hexamethylenediamine or 1,6-hexanediol. For example, a method for producing adipate can involve culturing a non-naturally occurring microbial organism having an adipate pathway, the pathway including at least one exogenous nucleic acid encoding an adipate pathway enzyme expressed in a sufficient amount to produce adipate, under conditions and for a sufficient period of time to produce adipate, the adipate pathway including succinyl-CoA: acetyl-CoA acyl transferase, 3-hydroxyacyl-CoA dehydrogenase, 3-hydroxyadipyl-CoA dehydratransaminasee,adipate semialdehydereductransaminasee, and adipyl-CoA synthetransaminasee or phosphotransadipylase/adipate kinase or adipyl-CoA: acetyl-CoA transferase or adipyl-CoA hydrolase. Additionally, a method for producing adipate can involve culturing a non-naturally occurring microbial organism having an adipate pathway, the pathway including at least one exogenous nucleic acid encoding an adipate pathway enzyme expressed in a sufficient amount to produce adipate, under conditions and for a sufficient period of time to produce adipate, the adipate pathway including succinyl-CoA: acetyl-CoA acyl transferase, 3-oxoadipyl-CoA transferase, 3-oxoadipate reductransaminasee, 3-hydroxyadipate dehydratransaminasee, and 2-enoate reductransaminasee.

[0173] Further, a method for producing 6-aminocaproic acid can involve culturing a non-naturally occurring microbial organism having a 6-aminocaproic acid pathway, the pathway including at least one exogenous nucleic acid encoding a 6-aminocaproic acid pathway enzyme expressed in a sufficient amount to produce 6-aminocaproic acid, under conditions and for a sufficient period of time to produce 6-aminocaproic acid, the 6-aminocaproic acid pathway including CoA-dependent trans-enoyl-CoA reductransaminasee and transaminase or 6-aminocaproate dehydrogenase. Additionally, a method for producing caprolactam can involve culturing a non-naturally occurring microbial organism having a caprolactam pathway, the pathway including at least one exogenous nucleic acid encoding a caprolactam pathway enzyme expressed in a sufficient amount to produce caprolactam, under conditions and for a sufficient period of time to produce caprolactam, the caprolactam pathway including CoA-dependent aldehyde dehydrogenase, transaminase or 6-aminocaproate dehydrogenase, and amidohydrolase.

[0174] Suitable purification and/or assays to test for the production of 6-aminocaproic acid, caprolactam, hexamethylenediamine or 1,6-hexanediol can be performed using well known methods. Suitable replicates such as triplicate cultures can be grown for each engineered strain to be tested. For example, product and byproduct formation in the engineered production host can be monitored. The final product and intermediates, and other organic compounds, can be analyzed by methods such as HPLC (High Performance Liquid Chromatography), GC-MS (Gas Chromatography-Mass Spectroscopy) and LC-MS (Liquid Chromatography-Mass Spectroscopy) or other suitable analytical methods using routine procedures well known in the art. The release of product in the fermentation broth can also be tested with the culture supernatant. Byproducts and residual glucose can be quantified by HPLC using, for example, a refractive index detector for glucose and alcohols, and a UV detector for organic acids (Lin et al., Biotechnol. Bioeng. 90:775-779 (2005)), or other suitable assay and detection methods well known in the art. The individual enzyme activities from the exogenous DNA sequences can also be assayed using methods well known in the art.

[0175] The 6-aminocaproic acid, caprolactam, hexamethylenediamine or 1,6-hexanediol can be separated from other components in the culture using a variety of methods well known in the art. Such separation methods include, for example, extraction procedures as well as methods that include continuous liquid-liquid extraction, pervaporation, membrane filtration, membrane separation, reverse osmosis, electrodialysis, distillation, crystallization, centrifugation, extractive filtration, ion exchange chromatography, size exclusion chromatography, adsorption chromatography, and ultrafiltration. All of the above methods are well known in the art.

[0176] Any of the non-naturally occurring microbial organisms described herein can be cultured to produce and/or secrete the biosynthetic products. For example, the 6-aminocaproic acid, caprolactam, hexamethylenediamine or 1,6-hexanediol producers can be cultured for the biosynthetic production of 6-aminocaproic acid, caprolactam, hexamethylenediamine or 1,6-hexanediol.

[0177] For the production of 6-aminocaproic acid, caprolactam, hexamethylenediamine or 1,6-hexanediol, the recombinant strains are cultured in a medium with carbon source and other essential nutrients. It is sometimes desirable and can be highly desirable to maintain anaerobic conditions in the fermenter to reduce the cost of the overall process. Such conditions can be obtained, for example, by first sparging the medium with nitrogen and then sealing the flasks with a septum and crimp-cap. For strains where growth is not observed anaerobically, microaerobic or substantially anaerobic conditions can be applied by perforating the septum with a small hole for limited aeration. Exemplary anaerobic conditions have been described previously and are well-known in the art. Exemplary aerobic and anaerobic conditions are described, for example, in U.S. Pat. No. 7,947,483 issued May 24, 2011. Fermentations can be performed in a batch, fed-batch or continuous manner, as disclosed herein.

[0178] If desired, the pH of the medium can be maintained at a desired pH, in particular neutral pH, such as a pH of around 7 by addition of a base, such as NaOH or other bases, or acid, as needed to maintain the culture medium at a desirable pH. The growth rate can be determined by measuring optical density using a spectrophotometer (600 nm), and the glucose uptake rate by monitoring carbon source depletion over time.

[0179] The growth medium can include, for example, any carbohydrate source which can supply a source of carbon to the non-naturally occurring microorganism. Such sources include, for example, sugars such as glucose, xylose, arabinose, galactose, mannose, fructose, sucrose and starch. Other sources of carbohydrate include, for example, renewable feedstocks and biomass. Exemplary types of biomasses that can be used as feedstocks in the methods include cellulosic biomass, hemicellulosic biomass and lignin feedstocks or portions of feedstocks. Such biomass feedstocks contain, for example, carbohydrate substrates useful as carbon sources such as glucose, xylose, arabinose, galactose, mannose, fructose and starch. Given the teachings and guidance provided herein, those skilled in the art will understand that renewable feedstocks and biomass other than those exemplified above also can be used for culturing the microbial organisms for the production of 6-aminocaproic acid, caprolactam, hexamethylenediamine or 1,6-hexanediol.

[0180] In addition to renewable feedstocks such as those exemplified above, the 6-aminocaproic acid, caprolactam, hexamethylenediamine, or levulinic acid microbial organisms also can be modified for growth on syngas as its source of carbon. In this specific embodiment, one or more proteins or enzymes are expressed in the 6-aminocaproic acid, caprolactam, hexamethylenediamine or 1,6-hexanediol producing organisms to provide a metabolic pathway for utilization of syngas or other gaseous carbon source.

[0181] Synthesis gas, also known as syngas or producer gas, is the major product of gasification of coal and of carbonaceous materials such as biomass materials, including agricultural crops and residues. Syngas is a mixture primarily of H2 and CO and can be obtained from the gasification of any organic feedstock, including but not limited to coal, coal oil, natural gas, biomass, and waste organic matter. Gasification is generally carried out under a high fuel to oxygen ratio. Although largely H2 and CO, syngas can also include CO2 and other gases in smaller quantities. Thus, synthesis gas provides a cost effective source of gaseous carbon such as CO and additionally, CO2.

[0182] The Wood-Ljungdahl pathway catalyzes the conversion of CO and H2 to acetyl-CoA and other products such as acetate. Organisms capable of utilizing CO and syngas also generally have the capability of utilizing CO2 and CO2/H2 mixtures through the same basic set of enzymes and transformations encompassed by the Wood-Ljungdahl pathway. H2-dependent conversion of CO2 to acetate by microorganisms was recognized long before it was revealed that CO also could be used by the same organisms and that the same pathways were involved. Many acetogens have been shown to grow in the presence of CO2 and produce compounds such as acetate as long as hydrogen is present to supply the necessary reducing equivalents (see for example, Drake, Acetogenesis, pp. 3-60 Chapman and Hall, New York, (1994)). This can be summarized by the following equation:

2CO2+4H2+n ADP+n Pi→CH₃COOH+2H2O+n ATP

[0183] Hence, non-naturally occurring microorganisms possessing the Wood-Ljungdahl pathway can utilize CO2 and H2 mixtures as well for the production of acetyl-CoA and other desired products.

[0184] The Wood-Ljungdahl pathway is well known in the art and consists of 12 reactions which can be separated into two branches: (1) methyl branch and (2) carbonyl branch. The methyl branch converts syngas to methyl-tetrahydrofolate (methyl-THF) whereas the carbonyl branch converts methyl-THF to acetyl-CoA. The reactions in the methyl branch are catalyzed in order by the following enzymes: ferredoxin oxidoreductransaminasee, formate dehydrogenase, formyltetrahydrofolate synthetransaminasee, methenyltetrahydrofolate cyclodehydratransaminasee, methylenetetrahydrofolate dehydrogenase and methylenetetrahydrofolate reductransaminasee. The reactions in the carbonyl branch are catalyzed in order by the following enzymes or proteins: cobalamide corrinoid/iron-sulfur protein, methyltransferase, carbon monoxide dehydrogenase, acetyl-CoA synthase, acetyl-CoA synthase disulfide reductransaminasee and hydrogenase, and these enzymes can also be referred to as methyltetrahydrofolate:corrinoid protein methyltransferase (for example, AcsE), corrinoid iron-sulfur protein, nickel-protein assembly protein (for example, AcsF), ferredoxin, acetyl-CoA synthase, carbon monoxide dehydrogenase and nickel-protein assembly protein (for example, CooC). Following the teachings and guidance provided herein for introducing a sufficient number of encoding nucleic acids to generate a 6-aminocaproic acid, caprolactam, hexamethylenediamine or 1,6-hexanediol pathway, those skilled in the art will understand that the same engineering design also can be performed with respect to introducing at least the nucleic acids encoding the Wood-Ljungdahl enzymes or proteins absent in the host organism. Therefore, introduction of one or more encoding nucleic acids into the microbial organisms such that the modified organism contains the complete Wood-Ljungdahl pathway will confer syngas utilization ability.

[0185] Additionally, the reductive (reverse) tricarboxylic acid cycle coupled with carbon monoxide dehydrogenase and/or hydrogenase activities can also be used for the conversion of CO, CO2 and/or H2 to acetyl-CoA and other products such as acetate. Organisms capable of fixing carbon via the reductive TCA pathway can utilize one or more of the following enzymes: ATP citrate-lyase, citrate lyase, aconitransaminase, isocitrate dehydrogenase, alpha-ketoglutarate: ferredoxin oxidoreductransaminasee, succinyl-CoA synthetransaminasee, succinyl-CoA transferase, fumarate reductransaminasee, fumarase, malate dehydrogenase, NAD(P)Ferredoxin oxidoreductransaminasee, carbon monoxide dehydrogenase, and hydrogenase. Specifically, the reducing equivalents extracted from CO and/or H2 by carbon monoxide dehydrogenase and hydrogenase are utilized to fix CO2 via the reductive TCA cycle into acetyl-CoA or acetate. Acetate can be converted to acetyl-CoA by enzymes such as acetyl-CoA transferase, acetate kinase/phosphotransacetylase, and acetyl-CoA synthetransaminasee. Acetyl-CoA can be converted to the p-toluate, terepathalate, or (2-hydroxy-3-methyl-4-oxobutoxy) phosphonate precursors, glyceraldehyde-3-phosphate, phosphoenolpyruvate, and pyruvate, by pyruvate: ferredoxin oxidoreductransaminasee and the enzymes of gluconeogenesis. Following the teachings and guidance provided herein for introducing a sufficient number of encoding nucleic acids to generate a p-toluate, terephthalate or (2-hydroxy-3-methyl-4-oxobutoxy) phosphonate pathway, those skilled in the art will understand that the same engineering design also can be performed with respect to introducing at least the nucleic acids encoding the reductive TCA pathway enzymes or proteins absent in the host organism. Therefore, introduction of one or more encoding nucleic acids into the microbial organisms such that the modified organism contains the complete reductive TCA pathway will confer syngas utilization ability.

[0186] Given the teachings and guidance provided herein, those skilled in the art will understand that a non-naturally occurring microbial organism can be produced that secretes the biosynthesized compounds when grown on a carbon source such as a carbohydrate. Such compounds include, for example, 6-aminocaproic acid, caprolactam, hexamethylenediamine or 1,6-hexanediol and any of the intermediate metabolites in the 6-aminocaproic acid, caprolactam, hexamethylenediamine or 1,6-hexanediol pathway. All that is required is to engineer in one or more of the required enzyme activities to achieve biosynthesis of the desired compound or intermediate including, for example, inclusion of some or all of the 6-aminocaproic acid, caprolactam, hexamethylenediamine or 1,6-hexanediol biosynthetic pathways. Accordingly, some embodiments provide a non-naturally occurring microbial organism that produces and/or secretes 6-aminocaproic acid, caprolactam, hexamethylenediamine or 1,6-hexanediol when grown on a carbohydrate and produces and/or secretes any of the intermediate metabolites shown in the 6-aminocaproic acid, caprolactam, hexamethylenediamine or 1,6-hexanediol pathway when grown on a carbohydrate. For example, an adipate producing microbial organisms can initiate synthesis from an intermediate, for example, 3-oxoadipyl-CoA, 3-hydroxyadipyl-CoA, 5-carboxy-2-pentenoyl-CoA, or adipyl-CoA (see FIG. 1), as desired. In addition, an adipate producing microbial organism can initiate synthesis from an intermediate, for example, 3-oxoadipyl-CoA, 3-oxoadipate, 3-hydroxyadipate, or hexa-2-enedioate. The 6-aminocaproic acid producing microbial organism can initiate synthesis from an intermediate, for example, adipate semialdehyde. The caprolactam producing microbial organism can initiate synthesis from an intermediate, for example, adipate semialdehyde or 6-aminocaproic acid (see FIG. 1), as desired.

TABLE 4
Activity of Aldehyde Dehydrogenases on Adipyl-CoA

| | | Accession | Activity - | Activity - |
|---|---|---|---|---|
| NO. | Organism | No/SEQ ID NO. | NADH | NADPH |
| 1 | Clostridium kluyveri DSM555 | SEQ ID NO: 141 | − | + |
| 2 | Porphyromonas gingivalis W83 | SEQ ID NO: 142 | + | − |
| 3 | Clostridium difficile 630 | SEQ ID NO: 143 | − | + |
| 4 | Kluyvera intestini | WP_071196317.1 | + | − |
| 5 | Clostridium neonatale | WP_058295546.1 | − | − |
| 6 | Aerococcus sp. HMSC062B07 | WP_070558456.1 | − | − |
| 7 | Peptostreptococcaceae bacterium | WP_021676458.1 | + | − |
| | oral | | | |
| 8 | Dasania marina | WP_026244399.1 | − | − |
| 9 | Porphyromonadaceae bacterium | WP_036830068.1 | − | − |
| | COT-184 | | | |
| 10 | Clostridium lundense | WP_027623222.1 | − | − |
| 11 | Anaerocolumna jejuensis | WP_073279774.1 | + | − |
| 12 | Clostridium homopropionicum | WP_052222510.1 | − | − |
| 13 | Geosporobacter ferrireducens | WP_069981616.1 | − | − |
| 14 | Listeria ivanovii | WP_038407128.1 | − | − |
| 15 | Bacillus soli | WP_066062455.1 | + | − |
| 16 | Enterococcus rivorum | WP_069697141.1 | − | − |
| 17 | Desnuesiella massiliensis | WP_055665162.1 | + | − |
| 18 | Bacteroidales bacterium KA00251 | WP_066041885.1 | − | − |
| 19 | Caldanaerobius | WP_026487268.1 | − | − |
| | polysaccharolyticus | | | |
| 20 | Clostridium sp. ASF356 | WP_004036483.1 | + | − |
| 21 | Clostridiales bacterium DRI-13 | WP_034420506.1 | − | − |
| 22 | Fusobacterium ulcerans ATCC | WP_005981617.1 | − | − |
| | 49185 | | | |
| 23 | Anaerocolumna jejuensis | WP_073279351.1 | − | − |
| 24 | Cellulosilyticum sp. I15G10I2 | WP_070001026.1 | + | − |
| 25 | Geosporobacter ferrireducens | WP_083273866.1 | + | − |
| 26 | Pelosinus sp. UFO1 | WP_038668911.1 | − | − |
| 27 | Bacillus korlensis | WP_084362095.1 | + | − |
| 28 | Acidaminococcus massiliensis | WP_075579339.1 | + | − |
| 29 | Eubacterium sp. SB2 | WP_050640767.1 | − | − |
| 30 | Erwinia teleogrylli | WP_058911295.1 | − | − |
| 31 | Lachnospiraceae bacterium 32 | WP_016223553.1 | + | − |
| 32 | Eubacterium plexicaudatum | WP_004061597.1 | + | − |
| 33 | Clostridium sp. KNHs205 | WP_033166114.1 | + | − |
| 34 | Butyricimonas virosa | WP_027200274.1 | − | − |
| 35 | Malonomonas rubra | WP_072908980.1 | − | − |
| 36 | Robinsoniella peoriensis | WP_044292972.1 | + | − |
| 37 | Clostridium taeniosporum | WP_069679818.1 | − | − |
| 38 | Caldithrix abyssi | WP_006928331.1 | + | − |
| 39 | Piscicoccus intestinalis | WP_084343789.1 | − | − |
| 40 | Sporomusa sphaeroides | WP_075753933.1 | + | − |
| 41 | Bacillus sp. FJAT-25547 | WP_057762439.1 | + | − |
| 42 | Dorea sp. D27 | WP_049729435.1 | + | − |
| 43 | Oscillibacter sp. 13 | WP_081646270.1 | − | − |
| 44 | Enterococcus phoeniculicola | WP_010767571.1 | + | − |
| 45 | Blautia schinkii | WP_044941637.1 | + | − |
| 46 | Shuttleworthia satelles DSM 14600 | WP_006905683.1 | − | − |
| 47 | Clostridium intestinale | WP_073018444.1 | + | − |
| 48 | Massilioclostridium coli | WP_069989048.1 | − | − |
| 49 | Cloacibacillus porcorum | WP_066745012.1 | − | − |
| 50 | Clostridium sp. CL-2 | WP_032120205.1 | − | − |
| 51 | Clostridia bacterium UC5.1-1D10 | WP_054330586.1 | − | − |
| 52 | Methylobacterium sp. CCH5-D2 | WP_082772960.1 | − | − |
| 53 | Sporosarcina globispora | WP_053435653.1 | + | + |
| 54 | Lachnospiraceae bacterium | WP_031546337.1 | − | − |
| | AC3007 | | | |
| 55 | Lachnospiraceae bacterium 28-4 | WP_016290199.1 | − | − |
| 56 | Enterococcus avium | WP_034875865.1 | − | − |
| 57 | Desulfotomaculum | WP_027356260.1 | − | − |
| | thermocisternum | | | |
| 58 | Rhodobacter aestuarii | WP_076486054.1 | + | − |
| 59 | Clostridium grantii | WP_073337420.1 | + | − |
| 60 | Collinsella sp. GD7 | WP_066830323.1 | + | − |
| 61 | Clostridium estertheticum | WP_071611886.1 | − | − |
| 62 | bacterium MS4 | WP_038325413.1 | − | − |
| 63 | Clostridium glycyrrhizinilyticum | WP_009268007.1 | + | − |
| 64 | Bacillus horikoshii | WP_082892049.1 | − | − |
| 65 | Thermincola ferriacetica | WP_052218568.1 | + | − |
| 66 | Lachnospiraceae bacterium | WP_035653923.1 | + | − |
| | AC3007 | | | |
| 67 | Eubacterium sp. 14-2 | WP_016216571.1 | + | − |
| 68 | Candidatus Marispirochaeta | WP_069895590.1 | − | − |
| | associata | | | |
| 69 | Clostridium drakei | WP_032078293.1 | − | − |
| 70 | Halanaerobium kushneri | WP_076543773.1 | − | − |
| 71 | Clostridium fallax | WP_072896506.1 | − | − |
| 72 | Flavonifractor plautii | WP_009261118.1 | − | − |
| 73 | Clostridium propionicum | WP_066049640.1 | − | − |
| 74 | Anaerosalibacter massiliensis | WP_042682918.1 | + | − |
| 75 | Clostridium indolis DSM 755 | WP_024295710.1 | + | − |
| 76 | Gabonibacter massiliensis | WP_059027034.1 | − | − |
| 77 | Catabacter hongkongensis | WP_046444791.1 | + | + |
| 78 | Desulfitibacter alkalitolerans | WP_028307735.1 | − | − |
| 79 | Porphyromonas levii | WP_018357742.1 | − | − |
| 80 | Bacillus thermotolerans | WP_039235348.1 | + | − |
| 81 | Desulfitibacter alkalitolerans | WP_028307055.1 | − | − |
| 82 | Gracilibacillus kekensis | WP_073203236.1 | + | + |
| 83 | Lactonifactor longoviformis | WP_072848455.1 | − | − |
| 84 | Propionispora sp. 2/2-37 | WP_054258533.1 | + | − |
| 85 | Erysipelothrix larvae | WP_067632640.1 | − | − |
| 86 | Clostridium chauvoei | WP_021875658.1 | + | − |
| 87 | Thermoanaerobacterium | WP_014757178.1 | + | − |
| | aotearoense | | | |
| 88 | Ruminococcus sp. AT10 | WP_059066688.1 | + | − |
| 89 | Porphyromonas sp. HMSC077F02 | WP_070707924.1 | − | − |
| 90 | Acetobacterium dehalogenans | WP_026396046.1 | + | − |
| 91 | Spirochaeta alkalica | WP_018526526.1 | + | − |
| 92 | Alistipes sp. ZOR0009 | WP_047449305.1 | − | − |
| 93 | Clostridiisalibacter paucivorans | WP_026895448.1 | − | − |
| 94 | Clostridium caminithermale DSM | WP_073149471.1 | + | + |
| | 15212 | | | |
| 95 | Caldanaerobius fijiensis | WP_073341480.1 | + | − |
| 96 | Clostridium kluyveri | WP_073539833.1 | − | − |
| 97 | Pelosinus fermentans | WP_007958399.1 | + | − |
| 98 | Halanaerobium saccharolyticum | WP_005487288.1 | − | − |
| | subsp. saccharolyticum DSM 6643 | | | |
| 99 | Anaeroarcus burkinensis DSM | WP_018702299.1 | − | − |
| | 6283 | | | |
| 100 | Blautia wexlerae | WP_026648408.1 | + | − |
| 101 | Paenibacillus sp. OSY-SE | WP_019424162.1 | + | − |
| 102 | Brachyspira intermedia PWSA | WP_014488056.1 | − | − |
| 103 | Spirochaetes bacterium | OHD32879.1 | + | − |
| | GWC2_52_13 | | | |
| 104 | Thermoanaerobacterales bacterium | KUK31085.1 | − | − |
| | 50_218 | | | |
| 105 | Cohaesibacter marisflavi | WP_090072157.1 | − | − |
| 106 | Gracilibacillus ureilyticus | WP_089739945.1 | − | − |
| 107 | Romboutsia lituseburensis DSM | WP_092724914.1 | + | − |
| 108 | uncultured Clostridium sp. | SCJ29526.1 | − | − |
| 109 | Clostridium sp. CAG: 448 | CDC62685.1 | + | − |
| 110 | Clostridium ultunense Esp | CCQ95129.1 | − | − |
| 111 | Yersinia bercovieri ATCC 43970 | WP_005274635.1 | + | − |
| 112 | Proteocatella sphenisci | WP_028829945.1 | + | − |
| 113 | Clostridium sp. MSTE9 | WP_009063988.1 | − | − |
| 114 | Spirochaeta africana | WP_014454236.1 | − | − |
| 115 | Deltaproteobacteria bacterium | OGQ13386.1 | − | − |
| | RIFCSPHIGHO2_02_FULL_40_11 | | | |
| 116 | Clostridiales bacterium | KKM11466.1 | − | − |
| | PH28_bin88 | | | |
| 117 | Pelosinus propionicus DSM | WP_090932308.1 | + | − |
| 118 | Propionispora vibrioides | WP_091747803.1 | − | − |
| 119 | Natronincola ferrireducens | WP_090549432.1 | − | − |
| 120 | uncultured Ruminococcus sp. | WP_112331601.1 | − | − |
| 121 | Firmicutes bacterium CAG: 41 | WP_022229858.1 | − | − |
| 122 | Tannerella sp. oral | ETK11816.1 | − | − |
| 123 | Clostridium sp. DL-VIII | WP_009171375.1 | − | − |
| 124 | Desulfobulbus japonicus | WP_028581706.1 | − | − |
| 125 | Veillonella sp. oral | WP_009353657.1 | − | − |
| 126 | Bacillus selenitireducens | WP_013174003.1 | − | − |
| 127 | Deltaproteobacteria bacterium | OGP02283.1 | − | − |
| | GWA2_38_16 | | | |
| 128 | Clostridiaceae bacterium BRH | KJS20094.1 | − | − |
| 129 | Clostridium cadaveris | WP_035770223.1 | − | − |
| 130 | Vibrio hangzhouensis | WP_103880502.1 | − | − |
| 131 | Halanaerobium congolense | SDI24694.1 | − | − |
| 132 | uncultured Eubacterium sp. | SCH28733.1 | − | − |
| 133 | Oscillibacter sp. CAG: 241 | CDB26907.1 | − | − |
| 134 | Clostridium sp. KLE | ERI68946.1 | + | − |
| 135 | Caldalkalibacillus thermarum | WP_007505383.1 | + | − |
| | TA2.A1 | | | |
| 136 | Budvicia aquatica | WP_029095874.1 | − | − |
| 137 | Caldalkalibacillus thermarum | WP_007505383.1 | + | − |
| | TA2.A1 | | | |
| 138 | Rhodospirillum rubrum ATCC | WP_011388669.1 | − | − |
| | 11170 | | | |
| 139 | Bacteroidetes bacterium | OFX78235.1 | − | − |
| | GWE2_39_28 | | | |
| 140 | Desulfosporosinus sp. BICA1 | KJS46946.1 | − | − |
| 141 | Clostridium uliginosum | WP_090094411.1 | − | − |
| 142 | Pseudobutyrivibrio sp. ACV-2 | WP_090301343.1 | − | − |
| 143 | Sporolituus thermophilus DSM | WP_093690468.1 | − | − |
| 144 | Eubacteriaceae bacterium | WP_087275421.1 | − | − |
| | CHKCI004 | | | |
| 145 | Blautia sp. CAG: 257 | CDA04862.1 | + | − |
| 146 | Listeria marthii FSL | EFR88049.1 | + | − |
| 147 | Desulfosporosinus sp. OT | WP_009624792.1 | − | − |
| 148 | Clostridium methoxybenzovorans | WP_024346771.1 | + | − |
| 149 | Bacillus sp. m3-13 | WP_010197697.1 | + | − |
| 150 | bacterium CG2_30_54_10 | OIP28307.1 | + | − |
| 151 | Halanaerobium sp. 4-GBenrich | ODS50009.1 | − | − |
| 152 | Candidatus Izimaplasma sp. | KFZ26741.1 | + | + |
| 153 | Desulfotomaculum guttoideum | WP_092244224.1 | − | − |
| 154 | Bacillus daliensis | WP_090843272.1 | − | − |
| 155 | Sporomusa acidovorans | WP_093796665.1 | − | − |
| 156 | Clostridium sp. C105KSO15 | WP_089994985.1 | − | − |
| 157 | Firmicutes bacterium CAG: 41 | CCZ36420.1 | + | − |
| 158 | Fusobacterium nucleatum subsp. | WP_085057258.1 | + | − |
| 159 | Thermoanaerobacterium | WP_013788835.1 | + | − |
| | xylanolyticum LX-11 | | | |
| 160 | Enterococcus pallens | WP_010758150.1 | − | − |
| 161 | Porphyromonas uenonis | WP_007364879.1 | − | − |
| 162 | Tenericutes bacterium | OHE32257.1 | − | − |
| | GWD2_38_27 | | | |
| 163 | Clostridia bacterium BRH_c25 | KU067763.1 | − | − |
| 164 | Listeria monocytogenes | WP_012951491.1 | + | − |
| 165 | Clostridium lavalense | WP_092361844.1 | + | − |
| 166 | Acetanaerobacterium elongatum | WP_092640331.1 | + | − |
| 167 | Alkaliphilus peptidifermentans | WP_091539210.1 | + | − |
| | DSM | | | |
| 168 | Clostridium sp. C105KSO15 | WP_089983798.1 | − | − |
| 169 | Ruminococcus sp. CAG: 17 | CCY97458.1 | − | − |
| 170 | Clostridium hylemonae DSM 15053 | EEG72288.1 | − | − |
| 171 | Acetonema longum DSM 6540 | EGO64744.1 | − | − |
| 172 | Brachyspira innocens | WP_020003501.1 | − | − |
| 173 | Clostridium saccharobutylicum | WP_022747467.1 | − | − |
| 174 | Tenericutes bacterium | OHE28831.1 | − | − |
| | GWD2_38_27 | | | |
| 175 | Bacillus sp. FJAT-25547 | WP_053476394.1 | − | − |
| 176 | Clostridium populeti | WP_092561044.1 | + | − |
| 177 | Natronincola peptidivorans | WP_090442614.1 | − | − |
| 178 | Megasphaera paucivorans | WP_091652222.1 | − | − |
| 179 | Anaerobium acetethylicum | WP_091232027.1 | − | − |
| 180 | Eubacterium limosum | ALU13318.1 | − | − |
| 181 | Porphyromonas sp. CAG: 1061 | CCY08492.1 | − | − |
| 182 | Clostridium beijerinckii strain | AAD31841.1 | − | − |
| | NRRL B593 | | | |
| 183 | Clostridium sticklandii DSM 519 | WP_013360893.1 | − | − |
| 184 | Bacillus oryziterrae | WP_017754440.1 | − | − |
| 185 | Yersinia enterocolitica | WP_005157703.1 | − | − |
| 186 | Syntrophobacterales bacterium | OHE18777.1 | − | − |
| | GWC2_56_13 | | | |
| 187 | Candidatus Bacteroides | KQM08700.1 | + | − |
| | periocalifornicus | | | |
| 188 | Anaerocolumna aminovalerica | WP_091689178.1 | + | − |
| 189 | Natronincola peptidivorans | WP_090439673.1 | − | − |
| 190 | Dendrosporobacter quercicolus | WP_092070189.1 | − | − |
| 191 | uncultured Flavonifractor sp. | SCJ32847.1 | − | − |
| 192 | Geobacillussp. Y4.1MC1 | OUM85091.1 | − | − |
| 193 | Clostridium bolteae CAG: 59 | CCX97030.1 | − | − |
| 194 | Roseburia inulinivorans A2-194 | WP_118109132.1 | − | − |

TABLE 5
5-carboxy-2-pentenoyl-CoA reductases

| Candidate | | Accession No/ | Activity | Activity |
|---|---|---|---|---|
| # | Species | SEQ ID NO. | CP-CoA | Cr-CoA |
| 1 | Candida | XP_026596596.1/ | + | + |
| | tropicalis | SEQ ID NO: 144 | | |
| 2 | Coraliomargarita | WP_013043307.1 | − | ND |
| | akajimensis | | | |
| | DSM 45221 | | | |
| 3 | Vibrio | WP_009599222.1 | − | ND |
| | caribbenthicus | | | |
| | ATCC BAA- | | | |
| | 2122 | | | |
| 4 | Cephaloticoccus | WP_068629633.1 | + | ND |
| | primus | | | |
| 5 | Opitutaceae | WP_068772922.1 | + | ND |
| | TSB47 | | | |
| 6 | Puniceicoccaceae | PDH30576.1 | + | ND |
| | MEDG31 | | | |
| 7 | Rubritalea | WP_018969548.1 | + | ND |
| | marina | | | |
| 8 | Rubritalea | WP_105041881.1 | + | ND |
| | profundi | | | |
| 9 | Rubritalea | SHK09753.1 | + | ND |
| | squalenifa | | | |
| 10 | Verrucomicrobiae | PAW64593.1 | − | ND |
| | bacterium | | | |
| 11 | Vibrio | WP_053410267.1 | + | ND |
| | hepatarius | | | |
| 12 | Vibrio | WP_065302224.1 | − | ND |
| | natriegens | | | |
| 13 | Vibrio owensii | WP_009705827.1 | − | ND |
| | LMG 25430 | | | |
| 14 | Vibrio sp. EJY3 | WP_014231565.1 | + | ND |
| 15 | Arabidopsis | CAB75790.1 | + | ND |
| | thaliana | | | |
| 16 | Rattus | NP_058905.1 | − | ND |
| | norvegicus | | | |
| 17 | Coraliomargarita | OUU72757.1 | + | ND |
| | sp. | | | |
| 18 | Haloferula sp. | WP_035604676.1 | + | ND |
| 19 | Opitutaceae | KRP37089.1 | + | ND |
| | BACL24 | | | |
| 20 | Opitutaceae | WP_107744621.1 | + | ND |
| | EW11 | | | |
| 21 | Puniceicoccaceae | PDH31188.1 | + | ND |
| | MED-G30 | | | |
| 22 | Terrimicrobium | WP_075078790.1 | − | ND |
| | sacchariphilum | | | |
| 23 | Vibrio owensii | WP_038894812.1 | + | ND |
| | ATCC | | | |
| 24 | Drosophila | NP_610914.2 | + | + |
| | melanogaster | SEQ ID NO: 145 | | |
| 25 | Homo sapiens | NP_057095.4 | + | ND |
| 26 | Euglena gracilis | Truncated version | + | + |
| | | of Q5EU90.1 | | |

[0187] The non-naturally occurring microbial organisms are constructed using methods well known in the art as exemplified herein to exogenously express at least one nucleic acid encoding a 6-aminocaproic acid, caprolactam, hexamethylenediamine or 1,6-hexanediol pathway enzyme in sufficient amounts to produce 6-aminocaproic acid, caprolactam, hexamethylenediamine or 1,6-hexanediol. It is understood that the microbial organisms are cultured under conditions sufficient to produce 6-aminocaproic acid, caprolactam, hexamethylenediamine or 1,6-hexanediol. Following the teachings and guidance provided herein, the non-naturally occurring microbial organisms can achieve biosynthesis of 6-aminocaproic acid, caprolactam, hexamethylenediamine or 1,6-hexanediol resulting in intracellular concentrations between about 0.1-200 mM or more. Generally, the intracellular concentration of 6-aminocaproic acid, caprolactam, hexamethylenediamine or 1,6-hexanediol is between about 3-150 mM, particularly between about 5-125 mM and more particularly between about 8-100 mM, including about 10 mM, 20 mM, 50 mM, 80 mM, or more. Intracellular concentrations between and above each of these exemplary ranges also can be achieved from the non-naturally occurring microbial organisms.

[0188] In some embodiments, culture conditions include anaerobic or substantially anaerobic growth or maintenance conditions. Exemplary anaerobic conditions have been described previously and are well known in the art. Exemplary anaerobic conditions for fermentation processes are described herein and are described, for example, in U.S. Pat. No. 7,947,483, issued May 24, 2011. Any of these conditions can be employed with the non-naturally occurring microbial organisms as well as other anaerobic conditions well known in the art. Under such anaerobic conditions, the 6-aminocaproic acid, caprolactam, hexamethylenediamine or 1,6-hexanediol producers can synthesize 6-aminocaproic acid, caprolactam, hexamethylenediamine or 1,6-hexanediol at intracellular concentrations of 5-10 mM or more as well as all other concentrations exemplified herein. It is understood that, even though the above description refers to intracellular concentrations, 6-aminocaproic acid, caprolactam, hexamethylenediamine or 1,6-hexanediol producing microbial organisms can produce 6-aminocaproic acid, caprolactam, hexamethylenediamine or 1,6-hexanediol intracellularly and/or secrete the product into the culture medium.

[0189] The culture conditions can include, for example, liquid culture procedures as well as fermentation and other large scale culture procedures. As described herein, particularly useful yields of the biosynthetic products can be obtained under anaerobic or substantially anaerobic culture conditions.

[0190] As described herein, one exemplary growth condition for achieving biosynthesis of 6-aminocaproic acid, caprolactam, hexamethylenediamine or 1,6-hexanediol includes anaerobic culture or fermentation conditions. In certain embodiments, the non-naturally occurring microbial organisms can be sustained, cultured or fermented under anaerobic or substantially anaerobic conditions. Briefly, anaerobic conditions refer to an environment devoid of oxygen. Substantially anaerobic conditions include, for example, a culture, batch fermentation or continuous fermentation such that the dissolved oxygen concentration in the medium remains between 0 and 10% of saturation. Substantially anaerobic conditions also include growing or resting cells in liquid medium or on solid agar inside a sealed chamber maintained with an atmosphere of less than 1% oxygen. The percent of oxygen can be maintained by, for example, sparging the culture with an N2/CO2 mixture or other suitable non-oxygen gas or gases.

[0191] The culture conditions described herein can be scaled up and grown continuously for manufacturing of 6-aminocaproic acid, caprolactam, hexamethylenediamine or 1,6-hexanediol. Exemplary growth procedures include, for example, fed-batch fermentation and batch separation; fed-batch fermentation and continuous separation, or continuous fermentation and continuous separation. All of these processes are well known in the art. Fermentation procedures are particularly useful for the biosynthetic production of commercial quantities of 6-aminocaproic acid, caprolactam, hexamethylenediamine or 1,6-hexanediol. Generally, and as with non-continuous culture procedures, the continuous and/or near-continuous production of 6-aminocaproic acid, caprolactam, hexamethylenediamine or 1,6-hexanediol will include culturing a non-naturally occurring 6-aminocaproic acid, caprolactam, hexamethylenediamine or 1,6-hexanediol producing organism in sufficient nutrients and medium to sustain and/or nearly sustain growth in an exponential phase. Continuous culture under such conditions can include, for example, 1 day, 2, 3, 4, 5, 6 or 7 days or more. Additionally, continuous culture can include 1 week, 2, 3, 4 or 5 or more weeks and up to several months. Alternatively, organisms can be cultured for hours, if suitable for a particular application. It is to be understood that the continuous and/or near-continuous culture conditions also can include all time intervals in between these exemplary periods. It is further understood that the time of culturing the microbial organism is for a sufficient period of time to produce a sufficient amount of product for a desired purpose.

[0192] Fermentation procedures are well known in the art. Briefly, fermentation for the biosynthetic production of 6-aminocaproic acid, caprolactam, hexamethylenediamine or 1,6-hexanediol can be utilized in, for example, fed-batch fermentation and batch separation; fed-batch fermentation and continuous separation, or continuous fermentation and continuous separation. Examples of batch and continuous fermentation procedures are well known in the art.

[0193] In addition to the above fermentation procedures using the 6-aminocaproic acid, caprolactam, hexamethylenediamine or 1,6-hexanediol producers for continuous production of substantial quantities of 6-aminocaproic acid, caprolactam, hexamethylenediamine or 1,6-hexanediol, the 6-aminocaproic acid, caprolactam, hexamethylenediamine or 1,6-hexanediol producers also can be, for example, simultaneously subjected to chemical synthesis procedures to convert the product to other compounds or the product can be separated from the fermentation culture and sequentially subjected to chemical conversion to convert the product to other compounds, if desired. As described herein, an intermediate in the adipate pathway utilizing 3-oxoadipate, hexa-2-enedioate, can be converted to adipate, for example, by chemical hydrogenation over a platinum catalyst.

[0194] As described herein, exemplary growth conditions for achieving biosynthesis of 6-aminocaproic acid, caprolactam, hexamethylenediamine or 1,6-hexanediol includes the addition of an osmoprotectant to the culturing conditions. In certain embodiments, the non-naturally occurring microbial organisms can be sustained, cultured or fermented as described above in the presence of an osmoprotectant. Briefly, an osmoprotectant means a compound that acts as an osmolyte and helps a microbial organism as described herein survive osmotic stress. Osmoprotectants include, but are not limited to, betaines, amino acids, and the sugar trehalose. Non-limiting examples of such are glycine betaine, praline betaine, dimethylthetin, dimethylslfonioproprionate, 3-dimethylsulfonio-2-methylproprionate, pipecolic acid, dimethylsulfonioacetate, choline, L-carnitine and ectoine. In one aspect, the osmoprotectant is glycine betaine. It is understood to one of ordinary skill in the art that the amount and type of osmoprotectant suitable for protecting a microbial organism described herein from osmotic stress will depend on the microbial organism used. For example, Escherichia coli in the presence of varying amounts of 6-aminocaproic acid is suitably grown in the presence of 2 mM glycine betaine. The amount of osmoprotectant in the culturing conditions can be, for example, no more than about 0. 1 mM, no more than about 0. 5 mM, no more than about 1. 0 mM, no more than about 1. 5 mM, no more than about 2. 0 mM, no more than about 2. 5 mM, no more than about 3. o mM, no more than about 5. 0 mM, no more than about 7. 0 mM, no more than about 10 mM, no more than about 50 mM, no more than about 100 mM or no more than about 500 mM.

[0195] Successfully engineering a pathway involves identifying an appropriate set of enzymes with sufficient activity and specificity. This entails identifying an appropriate set of enzymes, cloning their corresponding genes into a production host, optimizing fermentation conditions, and assaying for product formation following fermentation. To engineer a production host for the production of 6-aminocaproic acid or caprolactam, one or more exogenous DNA sequence(s) can be expressed in a host microorganism. In addition, the microorganism can have endogenous gene(s) functionally deleted. These modifications will allow the production of 6-aminocaproate or caprolactam using renewable feedstock.

[0196] In some embodiments minimizing or even eliminating the formation of the cyclic imine or caprolactam during the conversion of 6-aminocaproic acid to MD entails adding a functional group (for example, acetyl, succinyl) to the amine group of 6-aminocaproic acid to protect it from cyclization. This is analogous to ornithine formation from L-glutamate in Escherichia coli. Specifically, glutamate is first converted to N-acetyl-L-glutamate by N-acetylglutamate synthase. N-Acetyl-L-glutamate is then activated to N-acetylglutamyl-phosphate, which is reduced and transaminated to form N-acetyl-L-ornithine. The acetyl group is then removed from N-acetyl-L-ornithine by N-acetyl-L-ornithine deacetylase forming L-ornithine. Such a route is necessary because formation of glutamate-5-phosphate from glutamate followed by reduction to glutamate-5-semialdehyde leads to the formation of (S)-1-pyrroline-5-carboxylate, a cyclic imine formed spontaneously from glutamate-5-semialdehyde. In the case of forming HMD from 6-aminocaproic acid, the steps can involve acetylating 6-aminocaproic acid to acetyl-6-aminocaproic acid, activating the carboxylic acid group with a CoA or phosphate group, reducing, aminating, and deacetylating.

[0197] The invention additionally provides culture medium comprising bioderived HMD, 6-aminocaproate semialdehyde, and/or HDO, or other products disclosed herein, wherein the bioderived product has a carbon-12, carbon-13 and carbon-14 isotope ratio that reflects an atmospheric carbon dioxide uptake source. In a particular embodiment, the culture medium can be separated from a non-naturally occurring microbial organism having a HMD, 6-aminocaproate semialdehyde, and/or HDO pathway. In another embodiment, the invention provides bioderived a HMD, 6-aminocaproate semialdehyde, and/or HDO having a carbon-12, carbon-13 and carbon-14 isotope ratio that reflects an atmospheric carbon dioxide uptake source. In a particular embodiment, the bioderived HMD, 6-aminocaproate semialdehyde, and/or HDO of claims 61-62, can have an Fm value of at least 80%, at least 85%, at least 90%, at least 95% or at least 98%. Such bioderived products of the invention can be produced by the methods of the invention, as disclosed herein.

[0198] The invention further provides a composition comprising bioderived HMD, 6-aminocaproate semialdehyde, and/or HDO, and a compound other than the bioderived HMD, 6-aminocaproate semialdehyde, and/or HDO. The compound other than the bioderived product can be a trace amount of a cellular portion of a non-naturally occurring microbial organism of the invention having a HMD, 6-aminocaproate semialdehyde, and/or HDO. The composition can comprise, for example, bioderived HMD, 6-aminocaproate semialdehyde, and/or HDO, or a cell lysate or culture supernatant of a microbial organism of the invention. In some embodiments, the invention provides a composition comprising bioderived a HMD, 6-aminocaproate semialdehyde, and/or HDO having a carbon-12, carbon-13 and carbon-14 isotope ratio that reflects an atmospheric carbon dioxide uptake source. In a particular embodiment, the bioderived HMD, 6-aminocaproate semialdehyde, and/or HDO of claims 61-62, can have an Fm value of at least 80%, at least 85%, at least 90%, at least 95% or at least 98%. Compositions comprising such bioderived products of the invention can be produced by the methods of the invention, as disclosed herein.

### EXAMPLES

### Example 1. Identification of Transaminases with Activity on 6-Aminocaproic Acid (6ACA)

[0199] Genes encoding transaminases were identified bioinformatically from metagenomic libraries and public databases using a basic local alignment search tool (BLAST) (Table 6). Genes encoding each of the transaminases were synthesized, expressed in, and evaluated for catalytic activity on 6-aminocaproic acid (6ACA) and 7-aminobutyric acid (GABA) using an enzyme-coupled assay.

[0200] The genes encoding the TA enzyme candidates of Table 6 were cloned into a low copy number vector under a constitutive promoter and the constructs were transformed into E. coli using standard techniques. Transformants were cultured in LB medium in the presence of antibiotic overnight at 35° C., after which the cells were spun down at 15,000×g at room temperature. To make lysates, the supernatants were removed and E. coli cells expressing the TA gene were resuspended in a chemical lysis solution containing lysozyme, nuclease, and 10 mM DTT. Lysates were used immediately.

[0201] The transaminase assay solution contained 0. 1 M Tris-HCl, pH 8. 0; 0. 3 mM 6ACA, 0. 3 mM GABA, 0.3 mM HMD, or 20 mM Ala; 0. 1 mM γ-ketoglutarate; 1 mM NAD; and 50 U/mL glutamate dehydrogenase. The assay was initiated by adding the TA lysate and conducted at room temperature. Activity was monitored by an increase in absorbance of NADH at 340 nm relative to a lysate that contained no TA. The linear rate was calculated as Δabs/min. Rates >100 were designated as (++), rates between 1-100 were designated as (+), and rates with little to no activity were a designated (−). ND=not determined.

[0202] Table 6 shows that TA homologs 1, 3, 4, 5, 9, 12, 26, 27, 30, 31, 38, 50, 64, 74, 78, 79, 81, 91, 106, 108, and 116 have the highest activity levels on 6ACA.

TABLE 6
Transaminase Candidate Genes

| | | | | | | In vivo |
|---|---|---|---|---|---|---|
| Homolog | | | | Active | Active | 6ACA |
| # | Organism | SEQ ID NO: | Accession No. | 6ACA | GABA | Production |
| 1 | Achromobacter | SEQ ID NO: 1 | WP_013395096.1 | ++ | ++ | + |
| | xylosoxidans | | | | | |
| 2 | Metagenomic | | HAC67230.1 | − | ++ | |
| 3 | Metagenomic | SEQ ID NO: 3 | WP_100856578.1 | ++ | ++ | + |
| 4 | Metagenomic | SEQ ID NO: 4 | WP_025513437.1 | ++ | ++ | |
| 5 | Metagenomic | SEQ ID NO: 5 | WP_056075635.1 | ++ | ++ | |
| 6 | Metagenomic | | WP_017521342.1 | + | ++ | |
| 7 | Metagenomic | | WP_017201530.1 | ND | ND | |
| 8 | Metagenomic | | WP_059316136.1 | + | ++ | |
| 9 | Metagenomic | SEQ ID NO: 9 | WP_024817707.1 | ++ | ++ | |
| 10 | Metagenomic | | WP_093015681.1 | + | ++ | |
| 11 | Metagenomic | | WP_069902234.1 | − | ++ | |
| 12 | Metagenomic | SEQ ID NO: 12 | WP_009357183.1 | ++ | ++ | |
| 13 | Paenarthrobacter | SEQ ID NO: 13 | SEQ ID NO: 13 | + | ++ | + |
| | aurescens | | | | | |
| | TC1 | | | | | |
| 14 | Metagenomic | | WP_052967527.1 | − | ++ | |
| 15 | Metagenomic | SEQ ID NO: 15 | | + | ++ | |
| 16 | Metagenomic | | WP_043819139.1 | − | + | |
| 17 | Metagenomic | | WP_062073360.1 | + | ++ | |
| 18 | Metagenomic | | WP_015937959.1 | + | ++ | |
| 19 | Metagenomic | | WP_078774761.1 | + | ++ | |
| 20 | Metagenomic | | WP_046815379.1 | + | ++ | |
| 21 | Metagenomic | | WP_090288152.1 | − | + | |
| 22 | Metagenomic | | WP_056075635.1 | ND | ND | |
| 23 | Metagenomic | | WP_003220503.1 | − | − | |
| 24 | Metagenomic | | WP_003255866.1 | − | + | |
| 25 | Metagenomic | | WP_104171925.1 | − | + | |
| 26 | Metagenomic | SEQ ID NO: 26 | WP_123429804.1 | ++ | ++ | + |
| 27 | Metagenomic | SEQ ID NO: 27 | WP_030536079.1 | ++ | ++ | + |
| 28 | Metagenomic | | WP_040078233.1 | + | ++ | |
| 29 | Metagenomic | | EQM68262.1 | − | − | |
| 30 | Metagenomic | SEQ ID NO: 30 | WP_026539700.1 | ++ | ++ | |
| 31 | Metagenomic | SEQ ID NO: 31 | WP_012250302.1 | ++ | ++ | + |
| 32 | Metagenomic | | WP_007983072.1 | − | − | |
| 33 | Metagenomic | | WP_045059477.1 | − | + | |
| 34 | Metagenomic | | WP_093432282.1 | − | ++ | |
| 35 | Metagenomic | | WP_125050266.1 | − | ++ | |
| 36 | Metagenomic | SEQ ID NO:36 | | − | ++ | |
| 37 | Metagenomic | | WP_134929664.1 | − | − | |
| 38 | Metagenomic | SEQ ID NO: 38 | WP_056075635.1 | ++ | ++ | |
| 39 | Metagenomic | | WP_065926318.1 | − | − | |
| 40 | Metagenomic | | WP_123366550.1 | − | − | |
| 41 | Metagenomic | | WP_019473946.1 | − | ++ | |
| 42 | Metagenomic | | WP_065926966.1 | − | ++ | |
| 43 | Metagenomic | | WP_121733815.1 | − | ++ | |
| 44 | Metagenomic | | WP_015937959.1 | − | − | |
| 45 | Metagenomic | | WP_071291640.1 | + | + | |
| 46 | Metagenomic | | WP_111045681.1 | − | − | |
| 47 | Metagenomic | | WP_056737712.1 | + | ++ | |
| 48 | Metagenomic | | WP_042650496.1 | − | ++ | |
| 49 | Metagenomic | | WP_106886181.1 | + | ++ | |
| 50 | Metagenomic | SEQ ID NO: 50 | WP_056563276.1 | ++ | ++ | + |
| 51 | Metagenomic | | WP_017197131.1 | + | ++ | |
| 52 | Metagenomic | SEQ ID NO: 52 | WP_099790225.1 | + | ++ | + |
| 53 | Metagenomic | | WP_048393168.1 | − | + | |
| 54 | Metagenomic | | WP_123366550.1 | − | ++ | |
| 55 | Metagenomic | | WP_017391017.1 | + | ++ | |
| 56 | Metagenomic | SEQ ID NO: 56 | | + | ++ | |
| 57 | Metagenomic | | WP_056075635.1 | − | − | |
| 58 | Metagenomic | | WP_054597933.1 | − | − | |
| 59 | Metagenomic | | WP_095746204.1 | − | − | |
| 60 | Metagenomic | | WP_003220503.1 | − | − | |
| 61 | Metagenomic | | WP_017197131.1 | − | − | |
| 62 | Metagenomic | | WP_052967527.1 | − | ++ | |
| 63 | Metagenomic | | WP_021472307.1 | − | − | |
| 64 | Arthrobacter | SEQ ID NO: 64 | WP_055239729.1 | ++ | ++ | + |
| | sp. Edens01 | | | | | |
| 65 | Arthrobacter | | WP_074699490.1 | − | − | |
| | crytallopoietes | | | | | |
| 66 | Arthrobacter | | WP_079941468.1 | − | ++ | |
| | sp. KI72 | | | | | |
| 67 | Arthrobacter | | WP_087028133.1 | + | ++ | |
| | agilis | | | | | |
| 68 | Metagenomic | | WP_119966131.1 | + | ND | |
| 69 | Metagenomic | | RIK89039.1 | + | ND | |
| 70 | Metagenomic | | WP_016152939.1 | − | ND | |
| 71 | Metagenomic | | WP_089085686.1 | + | ND | |
| 72 | Metagenomic | | WP_054094475.1 | − | ND | |
| 73 | Metagenomic | | WP_105516444.1 | + | ++ | |
| 74 | Metagenomic | SEQ ID NO: 74 | WP_123787193.1 | ++ | ++ | |
| 75 | Metagenomic | | WP_088966344.1 | − | ND | |
| 76 | Metagenomic | | WP_119775651.1 | + | ND | |
| 77 | Metagenomic | SEQ ID NO: 77 | | + | ++ | |
| 78 | Metagenomic | SEQ ID NO: 78 | WP_011748622.1 | ++ | ND | |
| 79 | Metagenomic | SEQ ID NO: 79 | WP_111824632.1 | ++ | ++ | |
| 80 | Metagenomic | | HAU57754.1 | + | ND | |
| 81 | Metagenomic | SEQ ID NO: 81 | SHM39441.1 | ++ | ++ | |
| 82 | Metagenomic | | WP_043683590.1 | + | ND | |
| 83 | Metagenomic | SEQ ID NO: 83 | | − | ND | |
| 84 | Metagenomic | | WP_121579846.1 | + | ND | |
| 85 | Metagenomic | | WP_101193102.1 | + | ND | |
| 86 | Metagenomic | | WP_012249988.1 | + | ++ | |
| 87 | Metagenomic | | WP_119775651.1 | − | ND | |
| 88 | Metagenomic | | OGB44516.1 | + | ND | |
| 89 | Metagenomic | | WP_102820733.1 | + | ND | |
| 90 | Metagenomic | | SHM39441.1 | + | ++ | |
| 91 | Metagenomic | SEQ ID NO: 91 | SHM39441.1 | ++ | ++ | |
| 92 | Metagenomic | | WP_088966344.1 | + | ++ | |
| 93 | Metagenomic | | RIK89039.1 | + | ND | |
| 94 | Metagenomic | | WP_043683590.1 | + | ND | |
| 95 | Metagenomic | | WP_137155920.1 | + | ND | |
| 96 | Metagenomic | | WP_099059309.1 | + | ++ | |
| 97 | Metagenomic | | WP_101193102.1 | ND | ND | |
| 98 | Metagenomic | | WP_043683590.1 | + | ND | |
| 99 | Metagenomic | | WP_062685190.1 | + | ++ | |
| 100 | Metagenomic | | WP_081768742.1 | + | ND | |
| 101 | Metagenomic | | ODT51733.1 | + | ND | |
| 102 | Metagenomic | | WP_104959793.1 | + | ND | |
| 103 | Metagenomic | | WP_043683590.1 | + | ND | |
| 104 | Metagenomic | | HAU57754.1 | + | ND | |
| 105 | Metagenomic | | WP_009615038.1 | − | ND | |
| 106 | Metagenomic | SEQ ID NO: 106 | SHM39441.1 | ++ | ++ | |
| 107 | Metagenomic | | WP_056323744.1 | + | ++ | |
| 108 | Metagenomic | SEQ ID NO: 108 | WP_056323744.1 | ++ | ++ | |
| 109 | Metagenomic | | WP_088966344.1 | + | ++ | |
| 110 | Metagenomic | | SHM39441.1 | + | ND | |
| 111 | Metagenomic | | WP_125868825.1 | + | ND | |
| 112 | Metagenomic | SEQ ID NO: 112 | | + | ND | |
| 113 | Metagenomic | | WP_124644434.1 | + | ND | |
| 114 | Metagenomic | | WP_101193102.1 | + | ND | |
| 115 | Metagenomic | | WP_057067610.1 | + | ND | |
| 116 | Metagenomic | SEQ ID NO: 116 | ODT32214.1 | ++ | ++ | |
| 117 | Metagenomic | | WP_136961719.1 | + | ND | |
| 118 | Metagenomic | | WP_093109347.1 | − | ND | |
| 119 | Metagenomic | | WP_043683590.1 | + | ND | |
| 120 | Metagenomic | | WP_043683590.1 | − | ND | |
| 121 | Metagenomic | | WP_008955628.1 | + | ND | |
| 122 | Metagenomic | | SHM39441.1 | + | ND | |
| 123 | Metagenomic | | WP_003832711.1 | + | ND | |
| 124 | Metagenomic | | WP_116003699.1 | + | ND | |
| 125 | Metagenomic | | WP_120809350.1 | − | ND | |
| 126 | Metagenomic | | WP_026133539.1 | + | ++ | |
| 127 | Metagenomic | | WP_119775651.1 | + | ND | |
| 128 | Metagenomic | | SHM39441.1 | + | ++ | |
| 129 | Metagenomic | | WP_043683590.1 | + | ND | |
| 130 | Metagenomic | | WP_015475018.1 | − | ND | |
| 131 | Metagenomic | | WP_047290758.1 | ND | ND | |
| 132 | Metagenomic | | WP_116810265.1 | − | ND | |
| 133 | Saccharomyces | SEQ ID NO: 133 | NP 011533.3 | + | ++ | |
| | cerevisiae | | | | | |
| 134 | Clostridium | SEQ ID NO: 134 | WP_027096390.1 | + | ++ | |
| | viride | | | | | |
| 135 | Gulosibacter | SEQ ID NO: 135 | WP_026937197.1 | + | ++ | |
| | molinativorax | | | | | |
| 136 | Kocuria | SEQ ID NO: 136 | WP_012399017.1 | ++ | ++ | |
| | rhizophila | | | | | |
| 137 | Arthrobacter | SEQ ID NO: 137 | ABK04473.1 | ++ | ++ | |
| | sp. FB24 | | | | | |
| 138 | Pseudomonas | SEQ ID NO: 138 | WP_009615038.1 | + | + | |
| | sp. AAC | | | | | |
| 139 | Pseudomonas | SEQ ID NO: 139 | WP_043861306.1 | + | + | |
| | putida KG-4 | | | | | |
| 140 | Alcaligenes | SEQ ID NO: 140 | WP_006225725.1 | + | + | |
| | A. faecalis | | | | | |

### Example 2. In Vivo Assays of Transaminase Homologs

[0203] To test the activity of transaminase homologs in vivo, genes encoding selected transaminases were transformed into a strain of E. coli that also included introduced genes encoding 1) a 3-oxoadipyl-CoA thiolase (Thl), 2) a 3-oxoadipyl-CoA dehydrogenase (Hbd), 3) a 3-oxoadipyl-CoA dehydratratase (“crotonase” or Crt), 4) a 5-carboxy-2-pentenoyl-CoA reductases (Ter); and 5) an aldehyde dehydrogenase (Ald). The Thl, Hbd, Crt, Ter, Ald genes are reported in U.S. Pat. No. 8,377,680 (e.g., Example 8, which is incorporated by reference in its entirety). These genes are introduced in an E. coli strain included all of the pathway enzymes necessary for producing 6-aminocaproate (6ACA), with the exception of the TA enzyme.

[0204] The vectors for expressing the TA genes were transformed into the Thl/Hbd/Crt/Ter/Ald E. coli strain and transformants were tested for 6ACA production. The engineered E. coli cells were fed 2% glucose in minimal media, and after an 18 hour incubation at 35° C., the cells were harvested, and the supernatants were evaluated by analytical IPLC or standard LC/MS analytical method for 6ACA production. As shown in Table 6, expression of genes encoding the TA enzymes in E. coli that included Thl, Hbd, Crt, Ter, and Ald genes resulted in 6ACA production by these strains.

### Example 3. Transaminase Variants

[0205] Amino acid positions were identified for mutations in the Homolog 1 TA of Achromobacter xylosoxidans and encoded by SEQ ID NO:1 by examination of the crystal structure of the protein, and a gene encoding SEQ ID NO:1 was subjected to saturation mutagenesis at selected amino acid positions. The resulting variants were tested for activity in the lysate assay as described in Example 1. Results for the TA SEQ ID NO: 1 are shown in FIG. 2. FIG. 2 shows which positions of SEQ ID NO: 1 are important for activity.

[0206] Variants were generated by mutating the gene encoding the TA enzyme (SEQ ID NO: 1) at amino acid positions for V114, S136, T148, P153, I203, I204, P206, V207, V111, T216, A237, T264, M265 and L386 as well as the codons for G19, C22, D70, R94, D99, T109, E112, A113, F137, G144, I149, K150, Y154, S178, L186, Q208, L234, T242, A315, K318, R338, G336, L386, V390, A406, S416, and A421. Mutations were made singly and in combination with mutations at other amino acid positions. Mutations at the amino acid positions were made using degenerate primer sequences and PCR, where the altered gene sequence mixtures were transformed into E. coli. Transformants were tested in lysate assays as described in Example 1. Clones that provided lysates showing activity higher than wild type controls in the assays were retested in triplicate lysate assays. Clones that continued to demonstrate higher than wild type activity were then prepped for sequence analysis of the TA genes they contained.

[0207] Table 7 and FIG. 3 provide the mutations found in the variant TA gene sequences of the active clones. Variants demonstrating higher than wild type activity, denoted “+” or “++”, included single mutations and combinatorial (multiple) mutations in the TA gene. Table 7 shows that multiple variants demonstrated greater activity than the wild type TA (SEQ ID NO:1), with mutations at amino acid positions Vi 14, S136, T148, P153, I203, I204, P206, V207, V111, T216, A237, T264, M265, L386, G19, C22, D70, R94, D99, T109, E112, A113, F137, G144, 1149, K150, Y154, S178, L186, Q208, L234, T242, A315, K318, R338, G336, L386, V390, A406, S416, A421, G17, M21, A50, A76, Y77, Q78, 179, G84, F107, T108, K119, G139, M142, A152, P153, E205, G209, G211, D238, M285, A290, G291, G292, L293, Y297, M353, S387, S388, and G392 (positions identified with respect to SEQ ID NO:1) resulting in multiple variants with higher activity than the wild type TA from which they were derived.

[0208] In addition, several of the variants were assayed using 20 mM alanine as the substrate instead of 6ACA or GABA.

TABLE 7
Transaminase Variants

| | | | | | In vivo |
|---|---|---|---|---|---|
| Variant | | Active | Active | Active | 6ACA |
| # | Amino acid substitutions to SEQ ID NO: 1 | 6ACA | GABA | Ala | Production |
| 1 | A113V | + | ++ | ND | |
| 2 | E112K | − | − | ND | |
| 3 | I49V | + | ++ | ND | |
| 4 | T264S | + | ++ | ND | |
| 5 | G19R C22S D70N L186V K318M G336S | + | ++ | ND | |
| | S416Y | | | | |
| 6 | V111A | + | ++ | ND | |
| 7 | I203L | + | ++ | ND | |
| 8 | T148I | + | ++ | ND | |
| 9 | G19R D70N D99E L186V K318M G336S | + | ++ | ND | |
| | S416N | | | | |
| 10 | T109S | + | ++ | ND | |
| 11 | T148V | + | ++ | ND | |
| 12 | S136A | ++ | ++ | ND | |
| 13 | Q208R | + | ++ | ND | |
| 14 | L386V | + | ++ | ND | |
| 15 | G144C | + | ++ | ND | |
| 16 | I49V S136A T148I | + | ++ | ND | |
| 17 | S136C | + | ++ | ND | |
| 18 | S136G | + | ++ | ND | |
| 19 | I204K | + | ++ | ND | |
| 20 | M265C | + | ++ | ND | |
| 21 | V207E | + | ++ | ND | |
| 22 | S136A T148I V207E | ++ | ++ | ND | |
| 23 | V207T | + | ++ | ND | |
| 24 | I204Q | + | ++ | ND | |
| 25 | I204T | + | ++ | ND | |
| 26 | L386C | + | ++ | ND | |
| 27 | M265N | + | ++ | ND | |
| 28 | G19R D70N L186V K318M G336S S416Y | + | ++ | ND | |
| 29 | A237T | + | ++ | ND | |
| 30 | A237D | + | ++ | ND | |
| 31 | A237V | + | ++ | ND | |
| 32 | A237G | + | ++ | ND | |
| 33 | A237S | ++ | ++ | ND | |
| 34 | G243C | + | ++ | ND | |
| 35 | I49V S136A T148I V207E | ++ | ++ | ND | |
| 36 | M265A | + | ++ | ND | |
| 37 | T216V | + | ++ | ND | |
| 38 | G19R D70N F133L L186V K318M G336S S416Y | + | ++ | ND | |
| 39 | T216A | + | ++ | ND | |
| 40 | G19R C22S D70N L186V K318M G336S S416Y | + | ++ | ND | |
| 41 | T216C | + | ++ | ND | |
| 42 | T242A | + | ++ | ND | |
| 43 | T264P | + | ++ | ND | |
| 44 | F137W Y154N | + | ++ | ND | |
| 45 | Y154N | + | ++ | ND | |
| 46 | Y154I | + | ++ | ND | |
| 47 | G19R D70N L186V K318M G336S S416D | + | ++ | ND | |
| 48 | Y154L | + | ++ | ND | |
| 49 | Y154V | + | ++ | ND | |
| 50 | Y154F | + | ++ | ND | |
| 51 | Y154T | + | ++ | ND | |
| 52 | Y154C | + | + | ND | |
| 53 | Y154M | + | ++ | ND | |
| 54 | S136A T148I | ++ | ++ | ND | |
| 55 | F137T Y154K | − | ND | + | |
| 56 | F137I | − | ND | + | |
| 57 | G19R D70N K150R L186V L234I K318M G336S | + | ++ | ND | |
| | V390D S416N | | | | |
| 58 | T148D | + | ND | + | |
| 59 | L386A | + | ND | + | |
| 60 | R94H S178T A315V R338L | + | ++ | ND | |
| 61 | K226T R338L | + | ++ | ND | |
| 62 | R338L | + | ++ | ND | |
| 63 | L386C | + | ND | + | |
| 64 | G19R D70N L186V K318M G336S A406E | + | ++ | ND | |
| | S416Y | | | | |
| 65 | G19R D70N L186V K318M G336S L386P S416Y | + | ++ | ND | |
| | A421E | | | | |
| 66 | G19R D70N A76G L186V K318M G336S L386P | ++ | ++ | ND | |
| | S416Y A421E | | | | |
| 67 | G19R D70N A76Q L186V K318M G336S L386P | ++ | ++ | ND | |
| | S416Y A421E | | | | |
| 68 | G19R D70N G139E L186V K318M G336S | + | ++ | ND | |
| | L386P S416Y A421E | | | | |
| 69 | G19R D70N L186V G291S K318M G336S L386P | ++ | ++ | ND | |
| | S416Y A421E | | | | |
| 70 | G19R D70N L186V G292C K318M G336S | ++ | ++ | ND | |
| | L386P S416Y A421E | | | | |
| 71 | G19R I49Y D70N L186V K318M G336S L386P | ++ | ++ | ND | |
| | S416Y A421E | | | | |
| 72 | G19R D70N I79V L186V K318M G336S L386P | ++ | ++ | ND | |
| | S416Y A421E | | | | |
| 73 | G19R D70N K119Y L186V K318M G336S | + | ++ | ND | |
| | L386P S416Y A421E | | | | |
| 74 | G19R D70N L186V K318M G336S L386P L293C | ++ | ++ | ND | |
| | S416Y A421E | | | | |
| 75 | G19R D70N L186V K318M G336S L386P | ++ | ++ | ND | |
| | L293M S416Y A421E | | | | |
| 76 | G19R D70N M142S L186V K318M G336S | ++ | ++ | ND | |
| | L386P S416Y A421E | | | | |
| 77 | G19R D70N M142C L186V K318M G336S | ++ | ++ | ND | |
| | L386P S416Y A421E | | | | |
| 78 | G19R D70N M142Y L186V K318M G336S | ++ | ++ | ND | |
| | L386P S416Y A421E | | | | |
| 79 | G19R D70N P153D L186V K318M G336S L386P | ++ | ++ | ND | |
| | S416Y A421E | | | | |
| 80 | G19R D70N Q78V L186V K318M G336S L386P | ++ | ++ | ND | |
| | S416Y A421E | | | | |
| 81 | G19R D70N Q78A L186V K318M G336S L386P | ++ | ++ | ND | |
| | S416Y A421E | | | | |
| 82 | G19R D70N Q78Y L186V K318M G336S L386P | ++ | ++ | ND | |
| | S416Y A421E | | | | |
| 83 | G19R D70N Q78N L186V K318M G336S L386P | ++ | ++ | ND | |
| | S416Y A421E | | | | |
| 84 | G19R D70N V111S L186V K318M G336S L386P | ++ | ++ | ND | |
| | S416Y A421E | | | | |
| 85 | G19R D70N V111A L186V K318M G336S | ++ | ++ | ND | |
| | L386P S416Y A421E | | | | |
| 86 | G19R D70N Y154W L186V K318M G336S | + | ++ | ND | |
| | L386P S416Y A421E | | | | |
| 87 | G19R D70N Y154F L186V K318M G336S L386P | ++ | ++ | ND | |
| | S416Y A421E | | | | |
| 88 | G19R D70N Y77F L186V K318M G336S L386P | ++ | ++ | ND | |
| | S416Y A421E | | | | |
| 89 | G19R D70N I79V L186V K318M G336S L386P | ++ | ++ | ND | |
| | S416Y A421E | | | | |
| 90 | G19R D70N Q78N L186V K318M G336S L386P | ++ | ++ | + | + |
| | S416Y A421E | | | | |
| 91 | G19R D70N Q78N I79V L186V K318M G336S | ++ | ++ | ND | |
| | L386P S416Y A421E | | | | |
| 92 | G19R D70N Q78Y L186V K318M G336S L386P | ++ | ++ | ND | |
| | S416Y A421E | | | | |
| 93 | G19R D70N Q78Y I79V L186V K318M G336S | ++ | ++ | ND | |
| | L386P S416Y A421E | | | | |
| 94 | G19R D70N A76G L186V K318M G336S L386P | ++ | ++ | ND | |
| | S416Y A421E | | | | |
| 95 | G19R D70N A76G I79V L186V K318M G336S | ++ | ++ | ND | |
| | L386P S416Y A421E | | | | |
| 96 | G19R D70N A76G Q78N L186V K318M G336S | ++ | ++ | ND | |
| | L386P S416Y A421E | | | | |
| 97 | G19R D70N A76G Q78N I79V L186V K318M | ++ | ++ | ND | |
| | G336S L386P S416Y A421E | | | | |
| 98 | G19R D70N A76G Q78Y L186V K318M G336S | ++ | ++ | ND | |
| | L386P S416Y A421E | | | | |
| 99 | G19R D70N A76G Q78Y I79V L186V K318M | ++ | ++ | ND | |
| | G336S L386P S416Y A421E | | | | |
| 100 | G19R D70N A76G L186V K318M G336S L386P | ++ | ++ | ND | |
| | S416Y A421E | | | | |
| 101 | G19R D70N A76Q I79V L186V K318M G336S | ++ | ++ | ND | |
| | L386P S416Y A421E | | | | |
| 102 | G19R D70N A76Q Q78N L186V K318M G336S | ++ | ++ | ND | |
| | L386P S416Y A421E | | | | |
| 103 | G19R D70N A76Q Q78N I79V L186V K318M | ++ | ++ | + | + |
| | G336S L386P S416Y A421E | | | | |
| 104 | G19R D70N A76Q Q78Y L186V K318M G336S | − | ++ | ND | |
| | L386P S416Y A421E | | | | |
| 105 | G19R D70N A76Q Q78Y I79V L186V K318M | + | ++ | ND | |
| | G336S L386P S416Y A421E | | | | |
| 106 | G19R D70N V111A L186V K318M G336S | ++ | ++ | ND | |
| | L386P S416Y A421E | | | | |
| 107 | G19R D70N I79V V111A L186V K318M G336S | ++ | ++ | ND | |
| | L386P S416Y A421E | | | | |
| 108 | G19R D70N Q78N V111A L186V K318M G336S | ++ | ++ | ND | |
| | L386P S416Y A421E | | | | |
| 109 | G19R D70N Q78N I79V V111A L186V K318M | ++ | ++ | ND | |
| | G336S L386P S416Y A421E | | | | |
| 110 | G19R D70N Q78Y V111A L186V K318M G336S | ++ | ++ | + | + |
| | L386P S416Y A421E | | | | |
| 111 | G19R D70N Q78Y I79V V11A L186V K318M | ++ | ++ | ND | |
| | G336S L386P S416Y A421E | | | | |
| 112 | G19R D70N A76G V111A L186V K318M G336S | ++ | ++ | ND | |
| | L386P S416Y A421E | | | | |
| 113 | G19R D70N A76G I79V V111A L186V K318M | ++ | ++ | ND | |
| | G336S L386P S416Y A421E | | | | |
| 114 | G19R D70N A76G Q78N V111A L186V K318M | ++ | ++ | ND | |
| | G336S L386P S416Y A421E | | | | |
| 115 | G19R D70N A76G Q78N I79V V111A L186V | ++ | ++ | ND | |
| | K318M G336S L386P S416Y A421E | | | | |
| 116 | G19R D70N A76G Q78Y V111A L186V K318M | ++ | ++ | ND | |
| | G336S L386P S416Y A421E | | | | |
| 117 | G19R D70N A76G Q78Y I79V V11A L186V | ++ | ++ | ND | |
| | K318M G336S L386P S416Y A421E | | | | |
| 118 | G19R D70N A76Q V111A L186V K318M G336S | ++ | ++ | ND | |
| | L386P S416Y A421E | | | | |
| 119 | G19R D70N A76Q I79V V111A L186V K318M | ++ | ++ | + | + |
| | G336S L386P S416Y A421E | | | | |
| 120 | G19R D70N A76Q Q78N V111A L186V K318M | ++ | ++ | ND | |
| | G336S L386P S416Y A421E | | | | |
| 121 | G19R D70N A76Q Q78N I79V V111A L186V | ++ | ++ | ND | |
| | K318M G336S L386P S416Y A421E | | | | |
| 122 | G19R D70N A76Q Q78Y V111A L186V K318M | + | ++ | ND | |
| | G336S L386P S416Y A421E | | | | |
| 123 | G19R D70N A76Q Q78Y I79V V11A L186V | + | ++ | ND | |
| | K318M G336S L386P S416Y A421E | | | | |
| 124 | A76Q Q78N I79V L386P | + | + | + | + |
| 125 | G19R D70N A76Q Q78N I79V S136A M142I | ++ | ++ | ND | |
| | L186I A290L K318M G336S L386P V390A | | | | |
| | S416Y A421E | | | | |
| 126 | G19R D70N A76Q Q78N I79V K318M G336S | ++ | ++ | ND | + |
| | L386P V390L S416Y A421E | | | | |
| 127 | G19R D70N A76Q Q78N I79V K318M G336S | ++ | ++ | ND | |
| | L386P V390L S416Y A421E | | | | |
| 128 | G19R D70N A76Q Q78N I79V S136A L186V | ++ | ++ | ND | |
| | Y297F K318M G336S L386V V390A S416Y | | | | |
| | A421E | | | | |
| 129 | G19R D70N A76Q Q78N I79V S136A A152V | ++ | ++ | ND | |
| | L186M A290L Y297F K318M G336S L386I | | | | |
| | S416Y A421E | | | | |
| 130 | G19R D70N A76Q Q78N I79V A152T L186I | ++ | ++ | + | + |
| | Y297F K318M G336S L386V V390L S416Y | | | | |
| | A421E | | | | |
| | G19R D70N A76Q Q78N I79V A152T L186I | | | | |
| | Y297F K318M G336S L386P V390L S416Y | | | | |
| | A421E | | | | |
| 131 | G19R D70N A76Q Q78N I79V S136G A152T | ++ | ++ | ND | |
| | L186M K318M G336S L386V S416Y A421E | | | | |
| 132 | G19R D70N A76Q Q78N I79V A152T L186M | ++ | ++ | ND | |
| | A290L K318M G336S L386V S416Y A421E | | | | |
| 133 | G19R D70N A76Q Q78N I79V S136A A152V | ++ | ++ | ND | |
| | L186M Y297F K318M G336S L386P V390A | | | | |
| | S416Y A421E | | | | |
| 134 | G19R D70N A76Q Q78N I79V S136G A152V | ++ | ++ | ND | |
| | L1861 Y297F K318M G336S L386P S416Y | | | | |
| | A421E | | | | |
| 135 | G19R D70N A76Q Q78N I79V S136G A152T | ++ | ++ | ND | |
| | L186M A290L K318M G336S L386V S416Y | | | | |
| | A421E | | | | |
| 136 | G19R D70N A76Q Q78N I79V S136A A152V | ++ | ++ | + | + |
| | Y297F K318M G336S L386V V390A S416Y | | | | |
| | A421E | | | | |
| 137 | G19R D70N A76Q Q78N I79V S136A L186M | ++ | ++ | ND | |
| | A290L K318M G336S L386I V390L S416Y | | | | |
| | A421E | | | | |
| 138 | G19R D70N A76Q Q78N I79V S136A A152T | ++ | ++ | ND | |
| | L186M K318M G336S L386V S416Y A421E | | | | |
| 139 | G19R D70N A76Q Q78N I79V S136A L186M | ++ | ++ | ND | |
| | A290L K318M G336S L386V S416Y A421E | | | | |
| 140 | G19R D70N A76Q Q78N I79V S136A A152T | ++ | ++ | ND | |
| | L186I A290L K318M G336S L386V V390L | | | | |
| | S416Y A421E | | | | |
| 141 | G19R D70N A76Q Q78N I79V S136A L186I | ++ | ++ | ND | |
| | K318M G336S L386V Y297F V390A S416Y | | | | |
| | A421E | | | | |
| 142 | G19R D70N A76Q Q78N I79V S136A K318M | ++ | ++ | ND | |
| | G336S L386V V390L S416Y A421E | | | | |
| 143 | G19R D70N A76Q Q78N I79V S136A K318M | ++ | ++ | ND | |
| | G336S L386V V390A S416Y A421E | | | | |
| 144 | G19R D70N A76Q Q78N I79V S136G K318M | ++ | ++ | ND | |
| | G336S Y297F L386P S416Y A421E | | | | |
| 145 | G19R D70N A76Q Q78N I79V A152T A290L | ++ | ++ | ND | |
| | K318M G336S Y297F L386P S416Y A421E | | | | |
| 146 | G19R D70N A76Q Q78N I79V A152T A290L | ++ | ++ | ND | |
| | K318M G336S Y297F L386P S416Y A421E | | | | |
| 147 | G19R D70N A76Q Q78N I79V S136A A152T | ++ | ++ | ND | |
| | L186A A290L K318M G336S Y297F L386P | | | | |
| | V390A S416Y A421E | | | | |
| 148 | G19R D70N A76Q Q78N I79V S136G A152V | ++ | ++ | ND | |
| | L186M A290L K318M G336S Y297F L386P | | | | |
| | S416Y A421E | | | | |
| 149 | G19R D70N A76Q Q78N I79V K318M G336S | ++ | ++ | + | + |
| | Y297F L386V S416Y A421E | | | | |
| 150 | G17A G19R D70N A76Q Q78N I79V L186V | + | + | ND | |
| | K318M G336S L386P S416Y A421E | | | | |
| 151 | G19K D70N A76Q Q78N I79V L186V K318M | + | + | ND | |
| | G336S L386P S416Y A421E | | | | |
| 152 | G19Q D70N A76Q Q78N I79V L186V K318M | + | + | ND | |
| | G336S L386P S416Y A421E | | | | |
| 153 | M21Q G19R D70N A76Q Q78N I79V L186V | + | + | ND | |
| | K318M G336S L386P S416Y A421E | | | | |
| 154 | M21Q M285I G19R D70N A76Q Q78N I79V | + | + | ND | |
| | L186V K318M G336S L386P S416Y A421E | | | | |
| 155 | G17S G19R D70N A76Q Q78N I79V L186V | + | + | ND | |
| | K318M G336S L386P S416Y A421E | | | | |
| 156 | G17Y G19R D70N A76Q Q78N I79V L186V | − | + | ND | |
| | K318M G336S L386P S416Y A421E | | | | |
| 157 | C22M G19R D70N A76Q Q78N I79V L186V | − | + | ND | |
| | K318M G336S L386P S416Y A421E | | | | |
| 158 | C22Y G19R D70N A76Q Q78N I79V L186V | + | + | ND | |
| | K318M G336S L386P S416Y A421E | | | | |
| 159 | N70A G19R D70N A76Q Q78N I79V L186V | + | + | ND | |
| | K318M G336S L386P S416Y A421E | | | | |
| 160 | N70Y G19R D70N A76Q Q78N I79V L186V | − | + | ND | |
| | K318M G336S L386P S416Y A421E | | | | |
| 161 | G19R A76Q Q78N I79V L186V K318M G336S | + | + | ND | |
| | L386P S416Y A421E | | | | |
| 162 | G19R D70C A76Q Q78N I79V L186V K318M | + | + | ND | |
| | G336S L386P S416Y A421E | | | | |
| 163 | A50N G19R D70N A76Q Q78N I79V L186V | − | + | ND | |
| | K318M G336S L386P S416Y A421E | | | | |
| 164 | F107M G19R D70N A76Q Q78N I79V L186V | + | + | ND | |
| | K318M G336S L386P S416Y A421E | | | | |
| 165 | F107S G19R D70N A76Q Q78N I79V L186V | − | + | ND | |
| | K318M G336S L386P S416Y A421E | | | | |
| 166 | F107Q G19R D70N A76Q Q78N I79V L186V | + | + | ND | |
| | K318M G336S L386P S416Y A421E | | | | |
| 167 | T108Q G19R D70N A76Q Q78N I79V L186V | − | − | ND | |
| | K318M G336S L386P S416Y A421E | | | | |
| 168 | T108A G19R D70N A76Q Q78N I79V L186V | − | + | ND | |
| | K318M G336S L386P S416Y A421E | | | | |
| 169 | E112M G19R D70N A76Q Q78N I79V L186V | − | + | ND | |
| | K318M G336S L386P S416Y A421E | | | | |
| 170 | S136D G19R D70N A76Q Q78N I79V L186V | + | + | ND | |
| | K318M G336S L386P S416Y A421E | | | | |
| 171 | S136G G19R D70N A76Q Q78N I79V L186V | ++ | ++ | ND | |
| | K318M G336S L386P S416Y A421E | | | | |
| 172 | S136A G19R D70N A76Q Q78N I79V L186V | + | ++ | ND | |
| | K318M G336S L386P S416Y A421E | | | | |
| 173 | A152M G19R D70N A76Q Q78N I79V L186V | + | ++ | ND | |
| | K318M G336S L386P S416Y A421E | | | | |
| 174 | A152V G19R D70N A76Q Q78N I79V L186V | + | ++ | ND | |
| | K318M G336S L386P S416Y A421E | | | | |
| 175 | A152C G19R D70N A76Q Q78N I79V L186V | + | ++ | ND | |
| | K318M G336S L386P S416Y A421E | | | | |
| 176 | A152L G19R D70N A76Q Q78N I79V L186V | + | ++ | ND | |
| | K318M G336S L386P S416Y A421E | | | | |
| 177 | A152T G19R D70N A76Q Q78N I79V L186V | + | ++ | ND | |
| | K318M G336S L386P S416Y A421E | | | | |
| 178 | A152Q G19R D70N A76Q Q78N I79V L186V | + | ++ | ND | |
| | K318M G336S L386P S416Y A421E | | | | |
| 179 | K150H G19R D70N A76Q Q78N I79V L186V | + | + | ND | |
| | K318M G336S L386P S416Y A421E | | | | |
| 180 | G19R D70N A76Q Q78N I79V L186I K318M | + | ++ | ND | |
| | G336S L386P S416Y A421E | | | | |
| 181 | G19R D70N A76Q Q78N I79V L186M K318M | + | ++ | ND | |
| | G336S L386P S416Y A421E | | | | |
| 182 | E205D G19R D70N A76Q Q78N I79V L186V | + | + | ND | |
| | K318M G336S L386P S416Y A421E | | | | |
| 183 | D238E G19R D70N A76Q Q78N I79V L186V | − | + | ND | |
| | K318M G336S L386P S416Y A421E | | | | |
| 184 | D238I G19R D70N A76Q Q78N I79V L186V | − | + | ND | |
| | K318M G336S L386P S416Y A421E | | | | |
| 185 | G84V G19R D70N A76Q Q78N I79V L186V | + | + | ND | |
| | K318M G336S L386P S416Y A421E | | | | |
| 186 | D238M G19R D70N A76Q Q78N I79V L186V | − | + | ND | |
| | K318M G336S L386P S416Y A421E | | | | |
| 187 | G209G G19R D70N A76Q Q78N I79V L186V | + | ++ | ND | |
| | K318M G336S L386P S416Y A421E | | | | |
| 188 | G211N G19R D70N A76Q Q78N I79V L186V | − | + | ND | |
| | K318M G336S L386P S416Y A421E | | | | |
| 189 | T242F G19R D70N A76Q Q78N I79V L186V | − | + | ND | |
| | K318M G336S L386P S416Y A421E | | | | |
| 190 | A290D G19R D70N A76Q Q78N I79V L186V | − | + | ND | |
| | K318M G336S L386P S416Y A421E | | | | |
| 191 | A290K G19R D70N A76Q Q78N I79V L186V | + | + | ND | |
| | K318M G336S L386P S416Y A421E | | | | |
| 192 | A290I G19R D70N A76Q Q78N I79V L186V | + | + | ND | |
| | K318M G336S L386P S416Y A421E | | | | |
| 193 | Y297F G19R D70N A76Q Q78N I79V L186V | + | ++ | ND | |
| | K318M G336S L386P S416Y A421E | | | | |
| 194 | Y297P G19R D70N A76Q Q78N I79V L186V | + | + | ND | |
| | K318M G336S L386P S416Y A421E | | | | |
| 195 | M353N G19R D70N A76Q Q78N I79V L186V | + | + | ND | |
| | K318M G336S L386P S416Y A421E | | | | |
| 196 | G19R D70N A76Q Q78N I79V L186V K318F | + | ++ | ND | |
| | G336S L386P S416Y A421E | | | | |
| 197 | S387Y G19R D70N A76Q Q78N I79V L186V | + | + | ND | |
| | K318M G336S L386P S416Y A421E | | | | |
| 198 | C388A G19R D70N A76Q Q78N I79V L186V | + | + | ND | |
| | K318M G336S L386P S416Y A421E | | | | |
| 199 | G389G G19R D70N A76Q Q78N I79V L186V | + | + | ND | |
| | K318M G336S L386P S416Y A421E | | | | |
| 200 | G392T G19R D70N A76Q Q78N I79V L186V | − | + | ND | |
| | K318M G336S L386P S416Y A421E | | | | |
| 201 | G392N G19R D70N A76Q Q78N I79V L186V | + | + | ND | |
| | K318M G336S L386P S416Y A421E | | | | |
| 202 | V390L G19R D70N A76Q Q78N I79V L186V | + | ++ | ND | |
| | K318M G336S L386P S416Y A421E | | | | |
| 203 | V390D G19R D70N A76Q Q78N I79V L186V | + | + | ND | |
| | K318M G336S L386P S416Y A421E | | | | |
| 204 | V390A G19R D70N A76Q Q78N I79V L186V | + | + | ND | |
| | K318M G336S L386P S416Y A421E | | | | |
| 205 | G19R D70N A76Q Q78N I79V L186V K318M | + | + | ND | |
| | G336S L386P S416W A421E | | | | |
| 206 | G19R D70N A76Q Q78N I79V L186V K318M | + | + | ND | |
| | G336S L386P S416C A421E | | | | |
| 207 | G392A G19R D70N A76Q Q78N I79V L186V | + | + | ND | |
| | K318M G336S L386P S416Y A421E | | | | |
| 208 | G19R D70N A76Q Q78N I79V L186V K318M | + | + | ND | |
| | G336S L386S S416Y A421E | | | | |
| 209 | G19R D70N A76Q Q78N I79V L186V K318M | + | + | ND | |
| | G336S L386P S416Y A421D | | | | |
| 210 | G19R D70N A76Q Q78N I79V L186V K318M | ++ | ++ | ND | |
| | G336S S416Y A421E | | | | |
| 211 | G19R D70N A76Q Q78N I79V L186V K318M | ++ | ++ | ND | |
| | G336S L386V S416Y A421E | | | | |
| 212 | S136A A152V V386I V390A G19R D70N A76Q | ++ | ++ | ND | |
| | Q78N I79V K318M G336S Y297F L386V S416Y | | | | |
| | A421E | | | | |
| 213 | S136A A152T V390L G19R D70N A76Q Q78N | ++ | ++ | ND | |
| | I79V K318M G336S Y297F L386I S416Y A421E | | | | |
| 214 | S136A A152V V186I A290L Y297F G19R D70N | ++ | ++ | ND | |
| | A76Q Q78N I79V K318M G336S Y297F L386V | | | | |
| | S416Y A421E | | | | |
| 215 | S136A V186M Y297F G19R D70N A76Q Q78N | ++ | ++ | ND | |
| | I79V K318M G336S L386V S416Y A421E | | | | |
| 216 | S136A A152V G19R D70N A76Q Q78N I79V | ++ | ++ | ND | |
| | K318M G336S Y297F L386I S416Y A421E | | | | |
| 217 | G19R D70N A76Q Q78N I79V K318M G336S | ++ | ++ | ND | |
| | Y297F L386I S416Y A421E | | | | |
| 218 | V186I V390A G19R D70N A76Q Q78N I79V | ++ | ++ | ND | |
| | K318M G336S Y297F L386I S416Y A421E | | | | |
| 219 | S136A G19R D70N A76Q Q78N I79V K318M | ++ | ++ | ND | |
| | G336S Y297F L386V S416Y A421E | | | | |
| 220 | S136G A152V V186I G19R D70N A76Q Q78N | ++ | ++ | ND | |
| | I79V K318M G336S Y297F L386V S416Y | | | | |
| | A421E | | | | |
| 221 | V186I G19R D70N A76Q Q78N I79V K318M | ++ | ++ | ND | |
| | G336S Y297F L386V S416Y A421E | | | | |
| 222 | S136A A290L V390L G19R D70N A76Q Q78N | ++ | ++ | ND | |
| | I79V K318M G336S Y297F L386V S416Y | | | | |
| | A421E | | | | |
| 223 | S136A V186A G19R D70N A76Q Q78N I79V | ++ | ++ | ND | |
| | K318M G336S Y297F L386V S416Y A421E | | | | |
| 224 | S136A V186M G19R D70N A76Q Q78N I79V | ++ | ++ | ND | |
| | K318M G336S Y297F L386V S416Y A421E | | | | |
| 225 | S136A V186M A290L G19R D70N A76Q Q78N | ++ | ++ | ND | |
| | I79V K318M G336S Y297F L386V S416Y | | | | |
| | A421E | | | | |
| 226 | S136G V186I G19R D70N A76Q Q78N I79V | ++ | ++ | ND | |
| | K318M G336S Y297F L386V S416Y A421E | | | | |
| 227 | S136A A152V A290L G19R D70N A76Q Q78N | ++ | ++ | ND | |
| | I79V K318M G336S Y297F L386V S416Y | | | | |
| | A421E | | | | |
| 228 | S136G V186I G19R D70N A76Q Q78N I79V | ++ | ++ | ND | |
| | K318M G336S Y297F L386V S416Y A421E | | | | |
| 229 | S136G V186M G19R D70N A76Q Q78N I79V | ++ | ++ | ND | |
| | K318M G336S Y297F L386V S416Y A421E | | | | |
| 230 | S136A V186A G19R D70N A76Q Q78N I79V | ++ | ++ | ND | |
| | K318M G336S Y297F L386V S416Y A421E | | | | |
| 231 | S136G V186M G19R D70N A76Q Q78N I79V | ++ | ++ | ND | |
| | K318M G336S Y297F L386V S416Y A421E | | | | |
| 232 | S136A A152V G19R D70N A76Q Q78N I79V | ++ | ++ | ND | |
| | K318M G336S Y297F L386V S416Y A421E | | | | |
| 233 | S136A G19R D70N A76Q Q78N I79V K318M | ++ | ++ | ND | |
| | G336S Y297F L386V S416Y A421E | | | | |

### Example 4. Identification of CAR Homologs with Activity on 6-Aminocaproic Acid (6ACA)

[0209] Genes encoding CARs were identified bioinformatically from metagenomic libraries and public databases using a basic local alignment search tool (BLAST) (Table 8). Genes encoding each of the CARs were synthesized, expressed in, and evaluated for catalytic activity on 6-aminocaproic acid (6ACA) and hexanoate (GABA) using an enzyme-coupled assay.

[0210] Briefly, to evaluate carboxylic acid reductase (CAR) candidates and variants, an E. coli strain containing an integrated phosphopantetheine transferase strain harboring the CAR plasmid was generated. The strain was inoculated in LB with carbenicillin (100 μg/mL) and grown overnight at 37° C. in a shaking incubator. The overnight culture was diluted into into fresh LB with carbenicillin (100 μg/mL), IPTG (0.5 mM) and cumate (0.2 mM) and grown overnight at 27° C. in a shaking incubator. Cells were collected by centrifugation and frozen at −20° C. until the day of assay.

[0211] For in vitro lysate assay, the cell pellet was thawed and resuspended in 0.1 M Tris-HCl, pH 7.0 buffer. The OD600 was measured of cell suspension and each of the candidates were normalized to an OD of 4. Pellets were prepared by centrifugation and the pellet was then lysed with a chemical lysis reagent containing nuclease and lysozyme for 30 minutes at room temperature. This lysate was used to measure the CAR activity and the assay was carried out as follows: aliquot of the crude CAR lysate, desired acid substrate (hexanoate, 6-aminocaproic acid, butyrate, and 4-aminobutyric acid), 1 mM ATP, 0.3 mM NADPH, and 10 mM MgCl₂ were mixed in 0.04 mL of 0.1 M Tris-HCl, pH 7.4 buffer. The kinetics of the reaction was monitored by NADPH oxidation either by fluorescence or absorbance. The rate of CAR activity was determined from the progress curve.

[0212] Table 8 shows that CAR homologs corresponding to SEQ TD NOS: 150-165, 168-171, 173-178, 180, 183-185, 187-188, 190-193, 195, 198-200, 202-216, 218-219, 221-230, 232-238, 241-244, 246-249, 251-252 and 255-264 all exhibit activity on 6ACA, hexanoate or both.

TABLE 8
CAR Homologs

| | | SEQ | | | | In vivo |
|---|---|---|---|---|---|---|
| Homolog | | ID | | Active | Active | HMD |
| # | Organism | NO: | Accession No. | 6ACA | Hexanoate | production |
| 1 | Mycolicibacterium | 150 | WP_011728718.1 | + | + | |
| | smegmatis | | | | | |
| | MC2 155 | | | | | |
| 2 | Mycolicibacterium | 151 | AFP42026.1 | + | + | |
| | smegmatis | | | | | |
| | MC2 155 | | | | | |
| 3 | Mycobacterium | 152 | WP_003872682.1 | + | + | |
| | avium | | | | | |
| 4 | Mycobacterium | 153 | WP_003872682.1 | + | +++ | + |
| | avium | | | | | |
| 5 | Mycobacterium | 154 | WP_012393886.1 | + | + | |
| | marinum M | | | | | |
| 6 | Mycobacterium | 155 | ACC41375.1 | + | + | |
| | liflandii | | | | | |
| | 128FXT | | | | | |
| 7 | Mycobacterium | 156 | WP_011799278.1 | + | + | |
| | tuberculosis | | | | | |
| | variant bovis | | | | | |
| | BCG | | | | | |
| 8 | Streptomyces | 157 | WP_012382217.1 | + | + | |
| | griseus subsp. | | | | | |
| | griseus NBRC | | | | | |
| | 13350 | | | | | |
| 9 | Saccharomyces | 158 | NP 009673.1 | + | + | |
| | cerevisiae | | | | | |
| | S288C | | | | | |
| 10 | Cyanobium sp. | 159 | EDY38441.1 | + | + | |
| | PCC 7001 | | | | | |
| 11 | Neurospora | 160 | XP 955820.1 | ND | ND | |
| | crassa | | | | | |
| 12 | Streptomyces | 161 | ASW31113.1 | + | + | |
| | fradiae | | | | | |
| 13 | Mycobacterium | 162 | AXN44890.1 | + | + | |
| | liflandii | | | | | |
| | 128FXT | | | | | |
| 14 | Mycobacteroides | 163 | CPX02987.1 | ND | ND | |
| | abscessus | | | | | |
| 15 | Mycolicibacterium | 164 | EJZ09834.1 | − | + | |
| | vaccae | | | | | |
| | ATCC 25954 | | | | | |
| 16 | Sorangium | 165 | KYF89500.1 | − | + | |
| | cellulosum | | | | | |
| 17 | Mycobacteroides | 166 | SLB41318.1 | − | − | − |
| | abscessus | | | | | |
| | subsp. | | | | | |
| | massiliense | | | | | |
| 18 | Curtobacterium | 167 | WP_028185036.1 | − | − | |
| | sp. | | | | | |
| | MCSS17_007 | | | | | |
| 19 | Nocardia | 168 | WP_029900022.1 | | | |
| | brasiliensis | | | | | |
| | ATCC 700358 | | | | | |
| 20 | Allokutzneria | 169 | WP_030430720.1 | − | + | |
| | albata | | | | | |
| 21 | Mycolicibacterium | 170 | WP_042264421.1 | + | − | |
| | vanbaalenii | | | | | |
| | PYR-1 | | | | | |
| 22 | Nocardia | 171 | KIA63422.1 | − | ++ | |
| | vulneris | | | | | |
| 23 | Mycolicibacterium | 172 | WP_045824606.1 | − | − | |
| | confluentis | | | | | |
| 24 | Mycolicibacter | 173 | WP_046295775.1 | − | ++ | |
| | arupensis | | | | | |
| 25 | Mycobacterium | 174 | WP_047542266.1 | + | + | |
| | simiae | | | | | |
| 26 | Streptomyces | 175 | WP_050362911.1 | + | + | |
| | sp. TSRI0395 | | | | | |
| 27 | Nocardia | 176 | WP_051178149.1 | − | + | |
| | seriolae | | | | | |
| 28 | Acaromyces | 177 | WP_051297098.1 | + | + | |
| | ingoldii | | | | | |
| 29 | Rhodococcus | 178 | WP_056069829.1 | + | + | |
| | sp. Leaf247 | | | | | |
| 30 | Streptomyces | 179 | WP_057605035.1 | − | − | |
| | sp. Root1310 | | | | | |
| 31 | Sphingobium | 180 | WP_062112979.1 | + | + | |
| | sp. MI1205 | | | | | |
| 32 | Streptomyces | 181 | WP_062207887.1 | − | − | |
| | yunnanensis | | | | | |
| 33 | Mycobacterium | 182 | WP_064915933.1 | − | − | |
| | sp. KMS | 1 | | | | |
| 34 | Mycobacterium | 183 | WP_064939119.1 | − | + | |
| | intracellulare | | | | | |
| | ATCC 13950 | | | | | |
| 35 | Mycolicibacterium | 184 | WP_067216488.1 | − | + | |
| | celeriflavum | | | | | |
| 36 | Mycolicibacterium | 185 | WP_067876059.1 | + | + | |
| | fallax | | | | | |
| 37 | Nocardia | 186 | WP_067585591.1 | − | − | |
| | terpenica | | | | | |
| 38 | Mycolicibacterium | 187 | WP_067973901.1 | − | ++ | |
| | peregrinum | | | | | |
| 39 | Mycobacterium | 188 | WP_068119938.1 | − | + | |
| | sp. E1386 | | | | | |
| 40 | Mycobacteroides | 189 | WP_052544110 | − | − | |
| | abscessus | | | | | |
| | subsp. | | | | | |
| | abscessus | | | | | |
| 41 | Mycobacterium | 190 | WP_073684817.1 | − | ++ | |
| | sp. SWH-M1 | | | | | |
| 42 | Mycobacteroides | 191 | WP_074248349.1 | − | +++ | |
| | abscessus | | | | | |
| | subsp. bolletii | | | | | |
| 43 | Curtobacterium | 192 | WP_071245982.1 | ND | ND | |
| | sp. | | | | | |
| | MCBA15_012 | | | | | |
| 44 | Mycobacteroides | 193 | WP_074331300.1 | | | |
| | abscessus | | | | | |
| | subsp. | | | | | |
| | abscessus | | | | | |
| 45 | Mycobacterium | 194 | WP_076102317.1 | − | − | |
| | colombiense | | | | | |
| 46 | Williamsia | 195 | WP_076478068.1 | + | + | |
| | sterculiae | | | | | |
| 47 | Mycobacteroides | 196 | WP_078287768.1 | − | − | |
| | chelonae | | | | | |
| 48 | Mycobacterium | 197 | WP_079921768.1 | − | − | |
| | sp. AT1 | | | | | |
| 49 | Brevibacterium | 198 | WP_082829042.1 | + | ++ | |
| | casei | | | | | |
| 50 | Mycobacterium | 199 | WP_083087901.1 | + | + | |
| | noviomagense | | | | | |
| 51 | Mycolicibacterium | 200 | OBB89769.1 | ++ | ++ | |
| | peregrinum | | | | | |
| 52 | Pseudonocardia | 201 | ODU29987.1 | − | − | |
| | sp. SCN 73-27 | | | | | |
| 53 | Chloroflexi | 202 | PKN69095.1 | − | + | |
| | bacterium | | | | | |
| | HGW- | | | | | |
| | Chloroflexi-5 | | | | | |
| 54 | Mycolicibacterium | 203 | WP_083123568.1 | + | ++ | |
| | tusciae | | | | | |
| 55 | Mycolicibacterium | 204 | WP_100516314.1 | + | ++ | |
| | goodii | | | | | |
| 56 | Frankia sp. | 205 | WP_007506938.1 | ++ | ++ | |
| | EUN1h | | | | | |
| 57 | Mycobacterium | 206 | WP_015306631.1 | | | |
| | sp. JS623 | | | | | |
| 58 | Legionella | 207 | WP_028384907.1 | | | |
| | moravica | | | | | |
| 59 | Pseudomonas | 208 | WP_101209428.1 | ++ | ++ | |
| | sp. 43NM1 | | | | | |
| 60 | Mycobacterium | 209 | WP_104865516.1 | ++ | ++ | |
| | sp. EPG1 | | | | | |
| 61 | Aphanothece cf. | 210 | WP_106220800.1 | + | − | |
| | minutissima | | | | | |
| | CCALA 015 | | | | | |
| 62 | Rhodococcus | 211 | WP_114723703.1 | − | + | |
| | sp. AG1013 | | | | | |
| 63 | Rhodococcus | 212 | WP_114723596.1 | + | + | |
| | sp. AG1013 | | | | | |
| 64 | Microbacterium | 213 | WP_116239091.1 | ++ | ++ | |
| | sp. AG157 | | | | | |
| 65 | Nocardia sp. | 214 | WP_120042211.1 | + | + | |
| | YIM PH 21724 | | | | | |
| 66 | Myceligenerans | 215 | WP_123814706.1 | + | + | |
| | xiligouense | | | | | |
| 67 | Pseudonocardiales | 216 | WP_132386047.1 | | | |
| | bacterium | | | | | |
| 68 | Streptomyces | 217 | WP_126639580.1 | − | − | |
| | scabrisporus | | | | | |
| 69 | Mycobacterium | 218 | WP_133895376.1 | − | + | |
| | [tuberculosis] | | | | | |
| | TKK-01-0051 | | | | | |
| 70 | Mycolicibacterium | 219 | WP_133759136.1 | + | ++ | |
| | llatzerense | | | | | |
| 71 | Rhodococcus | 220 | WP_094685926.1 | − | − | |
| | sp. 06-469-3-2 | | | | | |
| 72 | Gordonia sputi | 221 | WP_005206594.1 | | | |
| | NBRC 100414 | | | | | |
| 73 | Mycobacteroides | 222 | SHU01071.1 | ++ | ++ | |
| | abscessus | | | | | |
| | subsp. | | | | | |
| | abscessus | | | | | |
| 74 | Mycobacterium | 223 | PJE23808.1 | ++ | ++ | |
| | sp. | | | | | |
| 75 | Mycobacterium | 224 | WP_104061604.1 | ++ | ++ | |
| | decipiens | | | | | |
| 76 | Mycobacteroides | 225 | WP_100483059.1 | − | + | |
| | abscessus | | | | | |
| | subsp. Bolletii | | | | | |
| 77 | Pseudomonas | 226 | WP_095030548.1 | − | + | |
| | fragi | | | | | |
| 78 | Rhodococcus | 227 | WP_094713117.1 | − | + | |
| | sp. 15-1154-1 | | | | | |
| 79 | Rhodococcus | 228 | WP_037189966.1 | + | + | |
| | sp. 05-340-1 | | | | | |
| 80 | Mycobacterium | 229 | WP_087077450.1 | − | + | |
| | dioxanotrophicus | | | | | |
| 81 | Mycobacterium | 230 | ORV97129.1 | | | |
| | kubicae | | | | | |
| 82 | Mycobacterium | 231 | OBK63104.1 | − | − | |
| | colombiense | | | | | |
| 83 | Mycobacterium | 232 | WP_096287632.1 | | | |
| | ahvazicum | | | | | |
| 84 | Mycobacterium | 233 | WP_065073482.1 | − | + | |
| | colombiense | | | | | |
| 85 | Clavibacter | 234 | CAN00144.1 | | | |
| | michiganensis | | | | | |
| | subsp. | | | | | |
| | michiganensis | | | | | |
| | NCPPB 382 | | | | | |
| 86 | Mycobacteroides | 235 | WP_134080798.1 | + | − | |
| | abscessus | | | | | |
| | subsp. bolletii | | | | | |
| | 50594 | | | | | |
| 87 | Mycolicibacterium | 236 | EHB47859.1 | | | |
| | rhodesiae | | | | | |
| | JS60 | | | | | |
| 88 | Mycobacteroides | 237 | WP_064629783.1 | − | + | |
| | immunogenum | | | | | |
| 89 | Mycobacteroides | 238 | WP_070909839.1 | − | + | |
| | saopaulense | | | | | |
| 90 | Rhodococcus | 239 | WP_057479409.1 | − | − | |
| | sp. 06-412-2C | | | | | |
| 91 | Mycobacterium | 240 | WP_066859835.1 | − | − | |
| | sp. 1482292.6 | | | | | |
| 92 | Rhodococcus | 241 | AMY55468.1 | + | + | |
| | sp. PBTS 2 | | | | | |
| 93 | Mycolicibacterium | 242 | WP_058127019.1 | − | + | |
| | smegmatis | | | | | |
| 94 | Mycobacteroides | 243 | WP_070928686.1 | − | + | |
| | sp. H092 | | | | | |
| 95 | Mycobacterium | 244 | WP_064951073.1 | + | + | |
| | colombiense | | | | | |
| 96 | Mycobacterium | 245 | OBH69834.1 | − | − | |
| | sp. TKK-01-0059 | | | | | |
| 97 | Mycobacterium | 246 | SOX51546.1 | | | |
| | ahvazicum | | | | | |
| 98 | Mycobacterium | 247 | WP_085225350.1 | − | + | |
| | florentinum | | | | | |
| 99 | Mycobacterium | 248 | ORV62949.1 | | | |
| | europaeum | | | | | |
| 100 | Mycobacterium | 249 | OBH23094.1 | − | ++ | |
| | sp. E1319 | | | | | |
| 101 | Mycobacterium | 250 | ORA19103.1 | − | − | |
| | arosiense ATCC | | | | | |
| | BAA-1401 = | | | | | |
| | DSM 45069 | | | | | |
| 102 | Mycolicibacterium | 251 | AQT80557.1 | − | + | |
| | litorale | | | | | |
| 103 | Mycobacterium | 252 | WP_015304658.1 | | | |
| | sp. JS623 | | | | | |
| 104 | Candida | 253 | KGU19302.1 | − | − | |
| | albicans | | | | | |
| | SC5314 | | | | | |
| 105 | Mycobacterium | 254 | WP_015306631.1 | ++ | ++ | |
| | sp. JS623 | | | | | |
| 106 | Nocardia | 255 | AFU02004.1 | + | − | |
| | brasiliensis | | | | | |
| | ATCC 700358 | | | | | |
| 107 | Segniliparus | 256 | WP_007468889.1 | − | + | |
| | rugosus ATCC | | | | | |
| | BAA-974 | | | | | |
| 108 | Nocardia sp. | 257 | AHH98121.1 | | | |
| | Y48 | | | | | |
| 109 | Mycolicibacterium | 258 | WP_042264421.1 | + | − | |
| | vanbaalenii | | | | | |
| | PYR-1 | | | | | |
| 110 | Mycolicibacterium | 259 | WP_067876059.1 | + | + | |
| | fallax | | | | | |
| 111 | Brevibacteriumcasei | 260 | WP_082829042.1 | + | ++ | |
| 112 | Myceligenerans | 261 | WP_123814706.1 | + | + | |
| | xiligouense | | | | | |
| 113 | Mycolicibacterium | 262 | WP_133759136.1 | + | ++ | |
| | llatzerense | | | | | |
| 114 | Rhodococcus | 263 | AMY55468.1 | + | ++ | |
| | fascians D188 | | | | | |
| 115 | Mycobacteroides | 264 | WP_005082584.1 | | | |
| | abscessus | | | | | |
| | subsp. | | | | | |
| | abscessus | | | | | |

| Activity Legend | |
|---|---|
| | ΔF/min |
| − | no to little activity |
| + | active; 0.1-1 |
| ++ | active; 1-100 |
| +++ | active; 100-500 |
| ++++ | active; >500 |
| ND | Not Determined |

### Example 5. In Vivo Assays of CAR Homologs

[0213] To test the activity of CAR homologs in vivo, genes encoding selected CAR homologs were transformed into a strain of E. coli that also included introduced genes encoding 1) a 3-oxoadipyl-CoA thiolase (Thl), 2) a 3-oxoadipyl-CoA dehydrogenase (Hbd), 3) a 3-oxoadipyl-CoA dehydratratase (“crotonase” or Crt), 4) a 5-carboxy-2-pentenoyl-CoA reductases (Ter); 5) an aldehyde dehydrogenase (Ald), 6) a 6ACA transaminase (TA), and 7) a HMD-transaminase (TA2). The Thl, Hbd, Crt, Ter, Ald genes are reported in U.S. Pat. No. 8,377,680 (e. g., Example 8, which is incorporated by reference in its entirety). These genes were introduced in an E. coli strain that included all of the pathway enzymes necessary for producing HMD, with the exception of the CAR enzyme.

[0214] The vectors for expressing the CAR genes were transformed into the Thl/Hbd/Crt/Ter/Ald/TA/TA2 E. coli strain and transformants were tested for HMD production. The engineered E. coli cells were fed 2% glucose in minimal media, and after an 18 hour incubation at 35° C., the cells were harvested, and the supernatants were evaluated by analytical HPLC or standard LC/MS analytical method for HMD production. As shown in Table 8 and Table 9, expression of genes encoding the CAR enzymes in E. coli that included Thl, Hbd, Crt, Ter, Ald, TA, and TA2 genes resulted in HMD production by these strains.

### Example 6. CAR Variants

[0215] Amino acid positions were identified for mutations in CAR Homolog 4 (SEQ ID NO:153) and CAR Homolog 105 (SEQ ID NO:254) by examination of the crystal structure of the protein, and a gene encoding SEQ ID NOS: 153 and 254 was subjected to saturation mutagenesis at selected amino acid positions. The resulting variants were tested for activity in the lysate assay as described in Example 4. Results for the CAR SEQ ID NO:153 for eight different substrates are shown in FIG. 11.

[0216] Variants were generated by mutating the gene encoding the CAR enzyme (SEQ ID NOS:153 and 254) at amino acid positions for P141, L245, I247, W270, S274, K275, N276, F278, G279, N279insert, A282, A283, S299, I300, N335, S336, M389, G391, G414, G421, M422, F425, G636, D809, I810, L811, A812 and F929. Mutations were made singly and in combination with mutations at other amino acid positions. Mutations at the amino acid positions were made using degenerate primer sequences and PCR, where the altered gene sequence mixtures were transformed into E. coli. Transformants were tested in lysate assays as described in Example 4. Clones that provided lysates showing activity in the assays were retested in triplicate lysate assays. Clones that continued to demonstrate activity were then prepped for sequence analysis of the CAR genes they contained.

[0217] Table 9 and FIG. 12 provide the mutations found in the variant CAR gene sequences of the active clones. Variants demonstrating higher than wild type activity included single mutations and combinatorial (multiple) mutations in the CAR gene. Table 9 shows that multiple variants demonstrated greater activity than the wild type CAR (SEQ ID NO:152), with mutations at amino acid positions P141, L245, I247, W270, S274, K275, N276, F278, G279, N279insert, A282, A283, S299, I300, N335, S336, M389, G391, G414, G421, M422, F425, G636, D809, I810, L811, A812 and F929 (positions identified with respect to SEQ ID NO:152) resulting in multiple variants with higher activity than the wild type CAR from which they were derived. Table 9. CAR Variants

TABLE 9
CAR Variants
Variants of Homolog 4 (SEQ ID NO: 153)

| | | | In vivo HMD |
|---|---|---|---|
| Variant # | Mutations to Homolog 4 | Active 6ACA | production |
| | none | ++ | + |
| 1 | N335E | +++ | + |
| 2 | N335D | +++ | + |
| 3 | S274D | ++ | + |
| 4 | S274E | ++ | |
| 5 | K275D | ++ | |
| 6 | K275E | ++ | |
| 7 | S299D | ++++ | + |
| 8 | S299E | +++ | |
| 9 | M389D | ++++ | + |
| 10 | M389E | +++ | |
| 11 | G414D | +++ | + |
| 12 | G414E | +++ | + |
| 13 | G421D | ++ | |
| 14 | G421E | ++ | |
| 15 | M422D | +++ | + |
| 16 | M422E | ++ | |
| 17 | F425D | ++ | |
| 18 | F425E | ++ | |
| 19 | N335D A282P | +++ | |
| 20 | N335D A282V | +++ | |
| 21 | N335D A283C | ++++ | |
| 22 | N335D A283C F929L | +++ | |
| 23 | N335D A283C G636D | +++ | |
| 24 | N335D A283G | +++ | |
| 25 | N335D F278A | ++++ | |
| 26 | N335D F278C | +++ | |
| 27 | N335D F278S | ++++ | |
| 28 | N335D F278V | ++++ | |
| 29 | N335D G279V | +++ | |
| 30 | N335D I247M | ++++ | |
| 31 | N335D I247Q | +++ | |
| 32 | N335D I247T | ++++ | |
| 33 | N335D I247V | +++ | |
| 34 | N335D I300C | +++ | |
| 35 | N335D I300G | +++ | |
| 36 | N335D I300M | +++ | |
| 37 | N335D I300M | +++ | |
| 38 | N335D I300Y | +++ | |
| 39 | N335D K275A | +++ | |
| 40 | N335D K275D | +++ | |
| 41 | N335D K275D | +++ | |
| 42 | N335D K275E | +++ | |
| 43 | N335D K275M | +++ | |
| 44 | N335D K275N | ++++ | |
| 45 | N335D K275S | +++ | |
| 46 | N335D K275T | +++ | |
| 47 | N335D K275V | +++ | |
| 48 | N335D K275W | +++ | |
| 49 | N335D L245C | +++ | |
| 50 | N335D L245G | +++ | |
| 51 | N335D L245S | +++ | |
| 52 | N335D L245T | ++++ | |
| 53 | N335D L245V | ++++ | |
| 54 | N335D M389I | +++ | |
| 55 | N335D M389W | +++ | |
| 56 | N335D M422D | +++ | |
| 57 | N335D N276S | +++ | |
| 58 | N335D N279 INSERT | +++ | |
| 59 | N335D P141G | +++ | |
| 60 | N335D S299D | ++++ | |
| 61 | N335D S299E | +++ | |
| 62 | N335D S391G | +++ | |
| 63 | N335D W270M | +++ | |
| 64 | K275D N276S F278S A283C N335D | ++++ | |
| 65 | L245V K275D N276S F278S A283C | ++++ | |
| | N335D | | |
| 66 | I247M K275D N276S F278A A283C | ++++ | |
| | N335D | | |
| 67 | L245V K275T N276S F278S A283C | ++++ | |
| | N335D | | |
| 68 | I247M K275T N276S F278S A283C | ++++ | |
| | N335D | | |
| 69 | K275D N276S F278S A283C 1300G | ++++ | + |
| | N335D | | |
| 70 | L245T K275D N276S F278A A283C | ++++ | |
| | N335D | | |
| 71 | K275N F278S A283C S299D N335D | ++++ | |
| 72 | I247M K275N N276S F278S A283C | ++++ | |
| | N335D | | |
| 73 | K275N F278S A283C I300G N335D | ++++ | |
| 74 | K275N N276S F278S A283C I300G | ++++ | |
| | N335D | | |
| 75 | I247M K275T F278S A283C N335D | ++++ | |
| 76 | L245V K275D N276S F278A A283C | ++++ | |
| | N335D | | |
| 77 | K275N F278S A283C I300G N335D | ++++ | |
| 78 | K275N F278A A283C S299D | ++++ | |
| | N335D | | |
| 79 | K275N N276S F278A A283C | ++++ | |
| | N335D | | |
| 80 | L245V K275N N276S F278S A283C | ++++ | |
| | I300G N335D | | |
| 81 | L245T K275N N276S F278S A283C | ++++ | |
| | I300G N335D | | |
| 82 | K275N F278A S299D N335D | ++++ | |
| 83 | I247M K275N F278A A283C I300Y | ++++ | |
| | N335D | | |
| 84 | I247M K275N F278A A283C | ++++ | |
| | N335D | | |
| 85 | K275D N276S F278A N335D | ++++ | |
| 86 | K275T F278A A283C S299D N335D | ++++ | |
| 87 | F278A A282P N335D | ++++ | |
| 88 | F278A A283C N335D | ++++ | |
| 89 | K275N S299D N335D | ++++ | |
| 90 | L245T S299D N335D | ++++ | |
| 91 | K275D S299D N335D | ++++ | |
| 92 | K275N F278S N335D | ++++ | |
| 93 | S299D M389W N335D | ++++ | |
| 94 | G279V S299D N335D | ++++ | |
| 95 | F278A S283C N335D | ++++ | |
| 96 | K275D N276S N335D | ++++ | |
| 97 | G279V S299E N335D | ++++ | |
| 98 | I247M S299D N335D | ++++ | |
| 99 | P141G A282P N335D | ++++ | |
| 100 | L245T A282P N335D | ++++ | |
| 101 | F278S A283C N335D | ++++ | |
| 102 | K275D S284I S299D N335D | ++++ | |
| 103 | I247M I282P N335D | ++++ | |
| 104 | I247V K275D N276S F278S A283C | ++++ | |
| | I300G N335D | | |
| 105 | K275D S274C N276S F278S A283C | ++++ | |
| | I300G N335D | | |
| 106 | K275D S274A N276S F278S A283C | ++++ | |
| | I300G N335D | | |
| 107 | K275D S274P N276S F278S A283C | ++++ | |
| | I300G N335D | | |
| 108 | K275D N276S F278S A282F A283C | ++++ | |
| | I300G N335D | | |
| 109 | K275D N276S F278S A282P A283C | ++++ | |
| | I300G N335D | | |
| 110 | K275D N276S F278S A283C S299I | ++++ | |
| | I300G N335D | | |
| 111 | K275D N276S F278S A283C I300G | ++++ | |
| | N335D M389C | | |
| 112 | K275D N276S F278S A283C I300G | ++++ | |
| | N335D M389Y | | |
| 113 | K275D N276S F278S A283C I300G | ++++ | |
| | N335D M389S | | |

Variants of Homolog 105

| | | | In vivo HMD |
|---|---|---|---|
| Variant # | Mutations to Homolog 105 | Active 6ACA | production |
| | none | ++ | + |
| 114 | S336E | +++ | + |
| 115 | S336D | +++ | + |

[0218] Table 10 shows that combination of mutations at positions 245, 247, 274, 275, 276, 278, 282, 283, 299, 300 and 389 of homolog 4 can result in 165,888 total unique combinations. The combination mutants are in addition to N335D of homolog 4.

TABLE 10
Combination Mutants of CAR Variants
of Homolog 4 (SEQ ID NO: 153)

| Position # | Position | WT | Mutant | Total |
|---|---|---|---|---|
| 1 | 245 | L | T, V | 3 |
| 2 | 247 | I | M, T, V | 4 |
| 3 | 274 | S | C, A, P | 4 |
| 4 | 275 | K | D, N, T | 4 |
| 5 | 276 | N | S | 2 |
| 6 | 278 | F | S, A | 3 |
| 7 | 282 | A | F, P | 3 |
| 8 | 283 | A | C | 2 |
| 9 | 299 | S | D, I | 2 |
| 10 | 300 | I | G, Y | 3 |
| 11 | 389 | M | C, Y, S | 4 |
| Total unique combinations | | | | 165,888 |

### Example 7. Identification of TA2 Transaminases with Activity on 6-Aminocaproate Semialdehyde

[0219] Genes encoding TA2 transaminases were identified and tested as described in Example 1.

[0220] Table 11 shows that TA2 homologues having SEQ ID NOS:265 and 267-296 exhibited activity in converting 6-aminocaproate semialdehyde to HMND.

TABLE 11
TA2 Homologs

| | | SEQ | | | | | In vivo |
|---|---|---|---|---|---|---|---|
| Homolog | | ID | | Active | Active | Active | HMDA |
| # | Organism | NO: | Accession No. | 6ACA | GABA | HMD | Production |
| 1 | Escherichia | 265 | WP_001301395.1 | + | − | ++ | + |
| | coli | | | | | | |
| 2 | Candidatus | 266 | RTL46196.1 | − | − | − | |
| | melainabacteria | | | | | | |
| 3 | Enterobacteriaceae | 267 | WP_080350600.1 | + | + | ++ | |
| 4 | Citrobacter | 268 | WP_124021456.1 | ND | ND | ND | |
| 5 | Enterobacteriaceae | 269 | WP_126317364.1 | ND | ND | ND | |
| 6 | Chloroflexi | 270 | RIK54736.1 | + | + | ++ | |
| | bacterium | | | | | | |
| 7 | Anaerolineae | 271 | RCK76150.1 | + | + | ++ | |
| | bacterium | | | | | | |
| 8 | Citrobacter | 272 | WP_127674105.1 | − | + | + | |
| | freundii | | | | | | |
| 9 | Anaerovorax | 273 | WP_027400467.1 | + | + | + | |
| | odorimutans | | | | | | |
| 10 | Citrobacter | 274 | POT29884.1 | + | + | + | |
| | braakii | | | | | | |
| 11 | Anaerolineaceae | 275 | RJP50214.1 | ND | ND | ND | |
| | bacterium | | | | | | |
| 12 | Citrobacter | 276 | SUX95114.1 | + | − | + | |
| | koseri | | | | | | |
| 13 | Enterobacteriaceae | 277 | KGB03050.1 | − | + | + | |
| | bacterium | | | | | | |
| | ATCC 29904 | | | | | | |
| 14 | Lelliottia | 278 | ROR10477.1 | − | + | + | |
| | amnigena | | | | | | |
| 15 | Enterobacter | 279 | WP_014171705.1 | + | + | ++ | |
| 16 | Yokenella | 280 | WP_120816925.1 | − | + | − | |
| | regensburgei | | | | | | |
| 17 | Enterobacter | 281 | WP_119936919.1 | − | − | ++ | |
| | huaxiensis | | | | | | |
| 18 | Shigella | 282 | WP_128881201.1 | − | + | + | |
| | dysenteriae | | | | | | |
| 19 | Vibrio sp. | 283 | WP_124935623.1 | − | + | + | |
| | LJC006 | | | | | | |
| 20 | Desulfobulbaceae | 284 | RPH40555.1 | − | − | + | |
| | bacterium | | | | | | |
| 21 | Chloroflexi | 285 | RPI92554.1 | − | + | + | |
| | bacterium | | | | | | |
| 22 | Bacillus sp. | 286 | WP_120036151.1 | ND | ND | ND | |
| | PK3 68 | | | | | | |
| 23 | Thermosporothrix | 287 | WP_111320425.1 | + | + | + | |
| | hazakensis | | | | | | |
| 24 | Hafnia alvei | 288 | WP_111329186.1 | − | + | + | |
| 25 | Quasibacillus | 289 | WP_039231281.1 | − | + | ++ | |
| | thermotolerans | | | | | | |
| 26 | Lelliottia | 290 | WP_095283474.1 | + | + | + | |
| 27 | Aneurinibacillus | 291 | WP_091260983.1 | − | − | ++ | |
| | thermoaerophilus | | | | | | |
| 28 | Buttiauxella | 292 | WP_064555484.1 | − | + | ++ | |
| | noackiae | | | | | | |
| 29 | Desulfosarcina | 293 | WP_054695015.1 | + | + | + | |
| | cetonica | | | | | | |
| 30 | Leclercia | 294 | WP_082697316.1 | − | − | ++ | |
| | adecarboxylata | | | | | | |
| 31 | Neisseria | 295 | WP_047761121.1 | + | + | + | |
| | arctica | | | | | | |
| 32 | Citrobacter | 296 | WP_053088666.1 | − | + | ++ | |
| | freundii | | | | | | |

### Example 8. Screening of Aldehyde Dehydrogenases from Various Microbial Sources for Activity on Adipyl-CoA

[0221] Genes encoding aldehyde dehydrogenases (ALD) from various species were identified bioinformatically in the genomes of multiple species (Table 4). Genes encoding each of the aldehyde dehydrogenases were synthesized, expressed in E. coli, and evaluated for ALD activity.

[0222] The genes encoding the ALD enzyme candidates of Table 12 were cloned into a low-copy vector under a constitutive promoter and the constructs were transformed into E. coli using standard techniques. Transformants were cultured in LB medium in the presence of antibiotic overnight at 35° C., after which the cells were harvested at 15,000 rpm at room temperature. To prepare lysates, cells were resuspended in a chemical lysis solution containing lysozyme, nuclease, and 10 mM DTT and incubated at room temperature for at least 30 min. The resulting lysate was used to test aldehyde dehydrogenase activity.

[0223] The lysates (5 μl) were added to an assay mixture to result in a total volume of 20 μL with final concentrations of 0.1 M Tris-HCl, pH 7.5, 2.5 mM adipyl-CoA (AdCoA), and either 0.5 mM NADH or 0.5 mM NADPH.

[0224] This assay was used to screen ALD enzymes from various species. Some ALD candidates were also assayed using succinyl-CoA (SuCoA) or acetyl-CoA (AcCoA) as substrates. AdCoA, SuCoA, and AcCoA were obtained from commercial suppliers. Activity was monitored by a linear decrease in fluorescence of NADH or NADPH in the presence of the CoA substrate. ALDs that were significantly active on adipyl-CoA using either the NADH or NADPH were designated as positive (+) in Table 4 and those with little to no activity were designated with a minus (−).

The application's sequence listing, which the Patent Office published only in electronic form, follows.

SEQUENCE LISTING (370 sequences)

SEQ ID NO: 1 - protein, 421 aa, Artificial Sequence
  Achromobacter xylosoxidans
MKNQDLNTRRSLATPRGVGVMCDFYAVRAENATLWDANGKEYIDFAGGIAVLNTGHLHPKIKAAVAAQLDNFTHTAYQIVPYEGYVSLAERINRLAPIDGLKKSAFFTTGVEAVENAVKIARSATGRSGVIAFSGSFHGRTMLGMALTGKVAPYKLSFGPMPGDIYHVPFPNATQSISVADSLKALDLLFKCDIDPKRVAAIIIEPVQGEGGFNITPPELMTALRKVCDEHGILLIADEVQTGFGRTGKLFAMEHHSVQADLITMAKSLGGGFPISGVVGRADVMDAPAAGGLGGTYAGNPLAVAAAHAVLDVIAEEKLCERADALGDKLRAHLEGLRAKVPGIADVRGLGSMVALELNDPATGKPDAEAVKRVQARAIEKGLILLSCGVYGNVLRFLYPLTIPDAQFDRALAILSEALAA

SEQ ID NO: 2 - skipped

SEQ ID NO: 3 - protein, 426 aa, Artificial Sequence
  Metagenomic
MFIEAEMKNQDLNTRRSLATPRGVGVMCDFYAVRAENATLWDANGKEYIDFAGGIAVLNTGHLHPKVKAAVAAQLDNFTHTAYQIVPYESYISLAERINRLAPIDGLKKTAFFTTGVEAVENAIKIARSSTGRSGVIAFSGSFHGRTMLGMALTGKVAPYKLSFGPMPGDIYHVPFPNATQAISVADSLKALDLLFKCDIDPKRVAAIIIEPVQGEGGFNITPPELMTALRKICDEHGILLIADEVQTGFGRTGKLYAMEHHSVQADLITMAKSLGGGFPISGVVGRADVMDGPAAGGLGGTYAGNPLAVAAAHAVLDVIAEEKLCDRANVLGEKLRAHLEGLRAKVPGIADVRGLGSMVALELNDASGKPDAEAVKRVQARALEQGLILLSCGVYGNVLRFLYPLTIPDAQFDRALAILSDALAA

SEQ ID NO: 4 - protein, 446 aa, Artificial Sequence
  Metagenomic
MVHLRAATRTSCTPVLTPSLTWRSAMKNMDLDTRRSLATPRGVGVAYSVYAVRAENATIWDADGKEYIDFAGGIAVLNTGHRHPKVKAAIAAQLECFTHTAYQIIPYEPYVALAERLNKIAPIDGLKKTAFFTTGAEAVENAIKIARAYTKRTGVIAFSGAFHGRTLLGMALTGKVAPYKVDFGAMPPDIFHAPFPNTTQDISVADALKHLELLFKVDIDPKRVAAIIIEPVQGEGGFNPAPAELMTALRRICDEHGIVLIADEVQTGFARTGKLFAMQHYDVQPDMMTVAKSLAGGMPLSGVIGRAEIMDAPNPGGLGGTYAGNALALASAHAVLDVIEEEQLCARAETLGQRLRDRLTALKGTVPALGEVRGPGSMVAVEMNDPATGKPDAEAVKRVQARALAQGLILITCGVYGNVLRFLYPLTIPDAQFDRALDILADAITA

SEQ ID NO: 5 - protein, 456 aa, Artificial Sequence
  Metagenomic
MTTTAADITYRLEQKRRVQADFPGPKSVALTERRKSVVAAGVASSVPVYVADADGGIIQDVDGNSFIDLGSGIAVTSVGASDPAVVGAVKEAVEHFTHTCFMVTPYEGYVAVAEQLNRLTPGDHEKRTVLFNSGAEAVENAVKVARLATGRDAVVAFDHAYHGRTNLTMALTAKAMPYKTNFGPFAPEVYRMPMSYPYREENPSITGAEAAKRAITAIEKQIGGDQVAAIIIEPIQGEGGFIVPAEGFLPALAAWAKEKGIVFIADEVQSGFCRTGEWFAVNHEGVIPDIITMAKGIAGGMPLSAITGRADLLDAVHPGGLGGTYGGNPVACAAALASIGSMEEYGLNARAKHIEELATTRLSALQEELAGAGSAVIGDIRGRGAMLAIELVHAGSKEPNPELTKAVAAACLKEGVIILTCGTYGNVIRLLPPLVITDELLNDGLDVLAAAIKANA

SEQ ID NO: 6-8 - skipped (3 entries)

SEQ ID NO: 9 - protein, 451 aa, Artificial Sequence
  Metagenomic
MTTTANELSYRIEQKRNINGAFPGPKSQALAERRAAVVAAGVASGVPVYVEDADGGIVRDVDGNSFIDLGSGIAVTSVGASDPAVVAAVQEAAAHFTHTCFMVTPYEGYVAVAEQLNRLTPGDHAKRTVLFNSGAEAVENAVKVARLATGRDAVVAFDHAYHGRTNLTMALTAKAMPYKTNFGPFAPEVYRMPMSYPFREENPEITGAEAAKRAITMIEKQIGGDQVAAIIIEPIQGEGGFIVPAEGFLPALSAWAKEKGIVFIADEVQSGFCRTGEWFAVDHEGVVPDIITMAKGIAGGLPLSAITGRADLLDAVHPGGLGGTYGGNPVACAAALAAIDTMEQHDLNGRARHIEELALGKLRELADEVSVVGDIRGHGAMLAIELVQSGSKEPNAELTKAVAAACLKEGVIILTCGTYGNVIRLLPPLVISDELLIDGLEVLAAAIKAHA

SEQ ID NO: 10-11 - skipped (2 entries)

SEQ ID NO: 12 - protein, 456 aa, Artificial Sequence
  Metagenomic
MTATASEITYRLEQKRRVQADFPGPKSAALTERRKSVVAAGVASSVPVYVADADGGIIHDVDGNSFIDLGSGIAVTSVGASDPAVVGAVKEAVEHFTHTCFMVTPYEGYVAVAEQLNRLTPGDHEKRTVLFNSGAEAVENAIKVARLATGRDAVVAFDHAYHGRTNLTMALTAKAMPYKTNFGPFAPEVYRMPMSYPYREENPAITGAEAAKRAITMIEKQIGGDQVAAIIIEPIQGEGGFIVPAEGFLPALAAWAKEKGIVFIADEVQSGFCRTGEWFAVNHEGIVPDIMTMAKGIAGGMPLSAITGRADLLDAVHPGGLGGTYGGNPVACAAALASIGSMEEYDLAGRARHIEALATGRLRELQAELADAGTAVIGDVRGRGAMLAIELVQAGSKEPNPELTKAVAAACLKEGVIILTCGTYGNVIRLLPPLVITDELLNDGLDVLAAAIKANA

SEQ ID NO: 13 - protein, 456 aa, Artificial Sequence
  Paenarthrobacter aurescens TC1
MTTTANELSYRIEQKRNINGAFPGPKSQALAERRSAVVAAGVASGVPVYVEDADGGIIRDVDGNSFIDLGSGIAVTSVGASDPAVVAAVQEAAAHFTHTCFMVTPYEGYVAVTEQLNRLTPGDHAKRTVLFNSGAEAVENAVKVARLATGRDAVVAFDHAYHGRTNLTMALTAKAMPYKTNFGPFAPEVYRMPMSYPFREENPEITGAEAAKRAITMIEKQIGGDQVAAIIIEPIQGEGGFIVPAEGFLPALSEWAKEKGIVFIADEVQSGFCRTGEWFAVDHEGVVPDIITMAKGIAGGLPLSAITGRADLLDAVHPGGLGGTYGGNPVACAAALAAIDTMEQHDLNGRARHIEELALGKLRELAAELSAGGGSVVGDIRGRGAMLAIELVQPGSKEPNAELTKAVAAACLKEGVIILTCGTYGNVIRLLPPLVISDELLIDGLEVLAAAIKAHA

SEQ ID NO: 14 - skipped

SEQ ID NO: 15 - protein, 425 aa, Artificial Sequence
  Metagenomic
MSKTNASLMKRREAAVPRGVGQIHPIFAESAKNATVTDVEGREFIDFAGGIAVLNTGHVHPKIIAAVTEQLNKLTHTCFQVLAYEPYVEVCEKINAKVPGDFAKKTLLVTTGSEAVENSIKIARAATGRAGVIAFTGAYHGRTMMTLGLTGKVVPYSAGMGLMPGGIFRALYPNELHGVSIDDSIASIERIFKNDAEPRDIAAIIIEPVQGEGGFYVAPKEFMKRLRALCDQHGILLIADEVQTGAGRTGTFFAMEQMGVAADLTTFAKSIAGGFPLAGVCGKAEYMDAIAPGGLGGTYAGSPIACAAALAVMEVFEEEHLLDRCKAVGERLVTGLKAIQAKYPVIGEVRALGAMIAVELFVDGDSHKPNAPAVAAVVAKARDKGLILLSCGTYGNVLRVLVPLTSPDEQLDKGLAIIEECFSEL

SEQ ID NO: 16-25 - skipped (10 entries)

SEQ ID NO: 26 - protein, 421 aa, Artificial Sequence
  Metagenomic
VNNHELNERRLQATPRGIGVMCGFYADKAENATLWDIEGNEVIDFAAGIAVLNTGHRHPKVIAAIEKQLQSFTHTAYQIVPYEGYIALAERINARVPIEGPAKTAFFSTGAEAVENAVKIARAYTKRPGLITFGGAFHGRTFMTMALTGKVAPYKLGFGPFPGSVYHAQYPNTLHGVSSQDALKSLERIFKADIAPDQVAAIILEPVQGEGGFNVAPPDFMQGLRALCDTHGILLIADEVQTGFARTGKLFSMEHHCVKPDLITMAKSLAGGMPLSAVSGRAEVMDAPAPGGLGGTYAGNPLAIAAALAVLDVIDEEDLCARASHLGHHLVEVLSKAKSGCPYIADIRAQGSMVAVEFNDPETGQPSPEFTRQVQERALAEGLLLLSCGVYGNVIRFLYPLTIPDAQFRKALDIISASLTR

SEQ ID NO: 27 - protein, 457 aa, Artificial Sequence
  Metagenomic
MTILEHGTETCIGGPTLPQIRRLVTEVPGPNSRALAKRRSAALPAGLTSGSSIYVAAAGGGVVVDVDDNSFIDFGSGIAVTTVGNSAPRVVERTTRQLGQFTHTCFLANPYEGYLEVCEALNRLTPGDHEKRTALFNTGSEALENAVKYARAATGRPAVVVFDHAFHGRTLMTMTMTAKNQPYKATFGPFAPEVYRVPMAYPYRWPSGPENAADEAFAQFRLAIDTQIGAESVAAVVVEPIQGEGGFIVPAPGFLKRISEFCRERGILVVADEVQTGIARTGSWFASESEDFVPDIITTAKGLAGGMPLAAVTGRADVMDAAHPGGIGGTYSGNPVACEAALAVFETIEMEGLLDRAKDIGDILTTGLSEIASETDIIGDIRGRGAMIAIELVHDEDKAPNREAVAQIVSYAHTHGLLLLTAGTYGNVVRFLPPLSISDELLTEGLGILRDAVAAVR

SEQ ID NO: 28-29 - skipped (2 entries)

SEQ ID NO: 30 - protein, 469 aa, Artificial Sequence
  Metagenomic
MRSASAPPVRISQKGNHPMTTTANELSYRIEQKRNINGAFPGPKSQALAERRSAVVAAGVASGVPVYVEDADGGIIRDVDGNSFIDLGSGIAVTSVGASDPAVVAAVQEAAAHFTHTCFMVTPYEGYVAVAEQLNRLTPGDHAKRTVLFNSGAEAVENAVKVARLATGRDAVVAFDHAYHGRTNLTMALTAKAMPYKTNFGPFAPEVYRMPMSYPFREENPEITGAEAAKRAITMIEKQIGGDQVAAIIIEPIQGEGGFIVPAEGFLPALSEWAKEKGIVFIADEVQSGFCRTGEWFAVDHEGVVPDIITMAKGIAGGLPLSAITGRADLLDAVHPGGLGGTYGGNPVACAAALAAIDTMEQHDLNGRARHIEELALGKLRELAGEVSVVGDIRGRGAMLAIELVQSGSKEPNAELTKAVAAACLKEGVIILTCGTYGNVIRLLPPLVISDELLIDGLEVLAAAIKAHA

SEQ ID NO: 31 - protein, 421 aa, Artificial Sequence
  Metagenomic
MQNPDLNTRRSLATPRGVGVMCDFYAMRAENATLWDSTGKEYIDFAGGIAVLNTGHRHPKIKAAVAEQLEAFTHTAYQIVPYESYVALAERINGLAPIDGLKKTAFFTTGVEAVENAVKIARAHTGRSGVVAFSGSFHGRTMLGMALTGKVAPYKLAFGPMPGDIYHVPFPNGTQDISVADSLKALDLLFKSDIDPRRVAAIIIEPVQGEGGFNITPPELMTALRKICDEYGIMLIADEVQTGFARTGKLYAMQHHDVQADLITMAKSLGGGFPISGVVGRAEVMDGPAPGGLGGTYAGNPLAVAAAHAVLDVIEEEKLCERAAELGQRLQERLNGLRPQCPAIADVRGLGSMVALELRDPATGQPDAAAVKRVQDAAIERGLILLSCGVYGNVLRFLYPLTIPDEQFARALDILSDILTA

SEQ ID NO: 32-35 - skipped (4 entries)

SEQ ID NO: 36 - protein, 425 aa, Artificial Sequence
  Metagenomic
MSKTNASLMKRREAAVPRGVGQIHPIFAESAKNATVTDVEGREFIDFAGGIAVLNTGHLHPKIIAAVTEQLNKLTHTCFQVLAYEPYVELCEKINAKVPGDFAKKTLLVTTGSEAVENAVKIARAATGRAGVIAFTGAYHGRTMMTLGLTGKVVPYSAGMGLMPGGVFRALYPNELHGVSVDDSIASIERIFKNDAEPRDIAAIIIEPVQGEGGFYVAPKEFMKRLRALCDQHGILLIADEVQTGAGRTGTFFAMEQMGVSADLTTFAKSIAGGFPLAGVCGKAEYMDAIAPGGLGGTYAGSPIACAAALAVMEVFEEEHLLDRCKAVGERLVTGLKAIQSKYPVIGEVRALGAMIAVELFVDGDSHKPNAAAVASVVAKARDKGLILLSCGTYGNVLRVLVPLTSPDEQLDKGLAIIEECFSEL

SEQ ID NO: 37 - skipped

SEQ ID NO: 38 - protein, 456 aa, Artificial Sequence
  Metagenomic
MTTTAADITYRLEQKRRVQADFPGPKSVALTERRKSVVAAGVASSVPVYVADADGGIIQDVDGNSFIDLGSGIAVTSVGASDPAVVGAVKEAVEHFTHTCFMVTPYEGYVAVAEQLNRLTPGDHEKRTVLFNSGAEAVENAVKVARLATGRDAVVAFDHAYHGRTNLTMALTAKAMPYKTNFGPFAPEVYRMPMSYPYREENPSITGAEAAKRAITAIEKQIGGDQVAAIIIEPIQGEGGFIVPAEGFLPALAAWAKDKGIVFIADEVQSGFCRTGEWFAVNHEGVVPDIITMAKGIAGGMPLSAITGRADLLDAVHPGGLGGTYGGNPVACAAALASIGSMEEYGLNARAKHIEELATTRLSALQEELAGAGSAVIGDIRGRGAMLAIELVQAGSKEPNPELTKAVAAACLKEGVIILTCGTYGNVIRLLPPLVITDELLNDGLDVLAAAIKANA

SEQ ID NO: 39-49 - skipped (11 entries)

SEQ ID NO: 50 - protein, 420 aa, Artificial Sequence
  Metagenomic
MKNQDLNTRRSLATPRGVGVMCDFYAVRAENATLWDAEGKEYIDFAGGIAVLNTGHLHPKVKAAVAAQLDNFTHTAYQIVPYEGYISLAERINRLAPIDGLKKTAFFTTGVEAVENAVKIARSSTGRSGVIAFSGSFHGRTMLGMALTGKVAPYKLSFGPMPGDIYHVPFPNATQSISVADSLKALDLLFKVDIDPKRVAAIIIEPVQGEGGFNITPPELMTALRKVCDEHGILLIADEVQTGFGRTGKLFAMEHHGVQADIITMAKSLGGGFPISGIVGRADVMDGPAAGGLGGTYAGNPLAVAAAHAVLDVIAEEKLCERAAQLGEKLRAHLEGLRAKVPGIADVRGLGSMVALELNDAAGKPDAEAVKRVQQRALDAGLILLSCGVYGNVLRFLYPLTIPDAQFARALDILSEALAA

SEQ ID NO: 51 - skipped

SEQ ID NO: 52 - protein, 429 aa, Artificial Sequence
  Metagenomic
MLTQVTTNASLQARKNAACAQGIGTLTPHFTARADNAELWDVEGRRFVDFASGIATLATGHRHPRIVAAVRAQLDDFHHTCFHVTPYEEYVALCEQLNRVVPGPSAKKSALFTTGAEAIENAMKVARAATGRSGVVAFSGAFHGRTFMGMALTGKVAPYKAGFGPMPGDVWHVPFPAAPLGVTVDDSIAALDRLFKTDVDPQRVAAIVIELVQGEGGFYVAPPALMEYLRAECDRHGILLVVDEIQTGFGRTGKLFALEHYGIEADLVTTAKSLAGGFPLSALTGRAELMDATRVGSLGGTYAGNPLAVAAALETMRVIEDEGLVARARMLGERLTACLAALRTEVPRICDVRGLGAMVAVEFRDPHSGEPDAEFTKRVHAAGLERGLLLLTCGVHGNVVRFLFPLTIPEAVYEEGLGLLAESIRAANV

SEQ ID NO: 53-55 - skipped (3 entries)

SEQ ID NO: 56 - protein, 425 aa, Artificial Sequence
  Metagenomic
MSKTNASLMKRREAAVPRGVGQIHPIFAESAKNATVTDVEGREFIDFAGGIAVLNTGHLHPKIIAAVTAQLNKLTHTCFQVLAYEPYVELCEKINAKVPGDFAKKTLLVTTGSEAVENAVKIARAATGRAGVIAFTGAYHGRTMMTLGLTGKVVPYSAGMGLMPGGIFRALYPNELHGVSIDDSIASIERIFKNDAEPRDIAAIIIEPVQGEGGFYVAPKEFMKRLRALCDQHGILLIADEVQTGAGRTGTFFAMEQMGVAADLTTFAKSIAGGFPLAGVCGKAEYMDAIAPGGLGGTYAGSPIACAAALAVMEVFEEEHLLDRCKAVGERLVTGLKAIQAKYPVIGEVRALGAMIAVELFVDGDSHKPNAPAVAAVVAKARDKGLILLSCGTYGNVLRVLVPLTSPDEQLDKGLAIIEECFAEL

SEQ ID NO: 57-63 - skipped (7 entries)

SEQ ID NO: 64 - protein, 455 aa, Artificial Sequence
  Arthrobacter sp. Edens01
MTFTASEATLPQTRHLATAVPGPRSRELHAERRQQVSSGFGTVLPVFIERAEGGILQDVDGNRFIDFASGIAVTSVGASNARVRERVAAQLERFTHTCFMVTEYESFTQVCRWLNEHTPGTFEKRTALFSTGAEAVENAVKIARAATGRPNVLVFDEAYHGRSLLTMAMTAKENPYRLNFGPLPGEVLRAPSANPLRPSRASVPGADPAAAALAGVEELLSEHGAGSFAAMVIEPIQGEGGFVVPAPGFLQGLRSLADQHGIVLVIDEIQAGMGRTGTLYASEHEGVAGDITLSAKALAGGLPLSAVTGRADLMDAVHTGGLGGTYAGNPLACEAALAVFEEFEDGTLLANARAIEETVREVLEPLVAQVPAVAEFRGRGAMLALEFADPETLEPRADLAQAASAACHAQGVLTLTCGTYGNVIRLLPPLVIPRDLLLDGLHVLRSAILEAAANS

SEQ ID NO: 65-73 - skipped (9 entries)

SEQ ID NO: 74 - protein, 421 aa, Artificial Sequence
  Metagenomic
MKNQDLNTRRSLATPRGVGVMCDFYAVRAENATLWDADGKEYIDFAGGIAVLNTGHLHPKIKAAVSAQLDNFTHTAYQIVPYEGYVSLAERINRLAPIDGLKKSAFFTTGVEAVENAVKIARSSTGRSGVIAFSGSFHGRTMLGMALTGKVAPYKLSFGPMPGDIYHVPFPNATQSITVADSLKALDLLFKCDIDPKRVAAIIIEPVQGEGGFNITPPELMTALRKVCDEHGILLIADEVQTGFGRTGKLFAMEHHSVQADLITMAKSLGGGFPISGVVGRAEIMDGPAAGGLGGTYAGNPLAVAAAHAVLDVIAEEKLCERAVALGDKLRAHLEGLRAKVPGIADVRGLGSMVALELNDPATGKPDAEAVKRVQARAIEKGLILLSCGVYGNVLRFLYPLTIPDAQFDRALAILSEVLAA

SEQ ID NO: 75-76 - skipped (2 entries)

SEQ ID NO: 77 - protein, 420 aa, Artificial Sequence
  Metagenomic
MKNQDLNTRRSLATPRGVGVMCDFYAVRAENATLWDAEGKEYIDFAGGIAVLNTGHLHPKVKAAVTAQLDNFTHTAYQIVPYEGYISLAERINRVAPIDGLKKTAFFTTGVEAVENAVKIARSATGRSGVIAFSGSFHGRTMLGMALTGKVAPYKLSFGPMPGDIYHVPFPNATQSISVADSLKALDLLFKVDIDPKRVAAIIIEPVQGEGGFNITPPELMTALRKVCDEHGILLIADEVQTGFGRTGKLFAMEHHTVQADIITMAKSLGGGFPISGIVGRAEIMDGPAAGGLGGTYAGNPLAVAAAHAVLDVIAEEKLCERATQLGDKLRAHLEGLRGKVPGIADVRGLGSMVALELNDAAGKPDAEAVKRVQKRALDAGLILLSCGVYGNVLRFLYPLTIPDAQFARALDILSEALAA

SEQ ID NO: 78 - protein, 422 aa, Artificial Sequence
  Metagenomic
MTSLTDRKNAAISRGVGMTTQIYAERAENAEIWDKDGNRYIDFAAGIAVVNTGHRHPRVVEAVKAQLDRFTHTCHQVVPYENYVALAERLNRLVPGNGPKKTAFYTTGAEAVENAVKIARHHTGRAGIIAFAGGFHGRTFLGMSLTGKVQPYKAGFGPMMNDIWHLPFPNALHGVTADEALAALDRLFKADIDPSRVAAIIVEPVQGEGGFYEAPPGFMQRLRQICDQYSILLIADEVQTGFARTGKLFAMEHHGVAADLTTMAKGLGGGLPISAVTGRADVMDSPAPGGLGGTYAGNPLAVAAAHAVLDVIEDEGLCERATRLGQRLKQRLAGIAETVPEIVDIRGPGFMNAVEFNTAGSDKPSADFANRVREEALKRNLILLTCGVHGNVIRFLAPLTIQDTVFDEALDILEDSIQAARN

SEQ ID NO: 79 - protein, 421 aa, Artificial Sequence
  Metagenomic
MKNQDLNTRRSLATPRGVGVMCDFYAVRAENATLWDAEGKEYIDFAGGIAVLNTGHLHPKVKAAVAAQLDAFTHTAYQIVPYEGYVTLAERINRVAPIAGLKKSAFFTTGVEAVENAVKIARSATGRSGVIAFSGSFHGRTMLGMALTGKVAPYKLSFGPMPGDIYHVPFPNAAQSVSVADSLKALDLLFKCDIDPRRVAAIIIEPVQGEGGFNITPPALMTALRKVCDEHGILLIADEVQTGFGRTGKLFAMEHHAVQADLITMAKSLGGGFPISGVVGRAEIMDAPAAGGLGGTYAGNPLAVAAAHAVLDVIAEEKLCERAALLGEKLRTHLEGLRATVPGIADVRGLGSMVALELNDAASGKPDAEAVKRVQARALERGLILLSCGVYGNVLRFLYPLTIPDAQFDRALAILSEVLAT

SEQ ID NO: 80 - skipped

SEQ ID NO: 81 - protein, 422 aa, Artificial Sequence
  Metagenomic
MTTMTDRKNAAISRGVGMTTQIYAERAENAEIWDREGRRYIDFAAGIAVVNTGHRHPKVVQAVKDQLDRFTHTCHQVVPYENYVALAERLNDLVPGDFEKKTIFATTGAEAVENAVKIARFATGRSAIIAFTGAFHGRTFMGMTLTGKVQPYKAGFGAMMPDVFHLPFPNELHGVSQDDALAALDKLFKADVDPARVAAIIVEPVQGEGGFYPVPSGFMQKLRSLCDDNGILLIADEVQTGFARTGRLFAMELHGVSADITTMAKGLGGGLPISAVTGRAEIMDAPNPGGLGGTYAGNPLGVAAAHAVLDIIEEEGLCDRAERLGQRLKQRLASLRDDVPEIVDIRGPGLMNAVEFNVAGSDRPNPEMTNRVREEALERGLILLTCGVYGNVIRFLPPLTVPDAVFDEALGILEDSIRAARG

SEQ ID NO: 82 - skipped

SEQ ID NO: 83 - protein, 422 aa, Artificial Sequence
  Metagenomic
MMQRRVAAVPRGVGQIHPIFADHAKNSSVVDVEGREFIDFAGGIAVLNTGHLHPKIVKAVEEQLHKLTHTCFQVLAYEPYIALCEAIAKRVPGDFAKKTLLVTSGSEAVENAVKIARAATGRAGVIAFTGAYHGRTMMTLSLTGKVVPYSAGMGLMPGGVFRALAPCPLHGISEDDAIASIERVFKNDAQPRDIAAIIIEPVQGEGGFYVNSPAFMQRLRALCDEHGILLIADEVQTGAGRTGTFFACEQLGIVPDLTTFAKSVGGGFPISGVCGKAEIMDVIAPGGLGGTYAGSPIACAAALAVMEVFEEEKLLERSQAVGEKLKAGLNAIAARHKVIGDVRGLGSMVAIELFEGGDHSKPAAELVGRIVARARDKGLLLLSCGTYYNVIRFLMPLTIPDAQLERGLAIVAECFDELASEQ

SEQ ID NO: 84-90 - skipped (7 entries)

SEQ ID NO: 91 - protein, 422 aa, Artificial Sequence
  Metagenomic
MTTMTDRKNAAISRGVGMTTQIYAERAENAEIWDREGRRYIDFAAGIAVVNTGHRHPKVVQAVKDQLDRFTHTCHQVVPYENYVALAERLNDLVPGDFEKKTIFATTGAEAVENAVKIARFATGRSAIIAFTGAFHGRTFMGMTLTGKVQPYKAGFGAMMPDVFHLPFPNELHGVSQDDALAALDKLFKADVDPARVAAIIVEPVQGEGGFYPVPSGFMQKLRAICDDNGILLIADEVQTGFARTGRLFAMEHHGVSADITTMAKGLGGGLPISAVTGRAEIMDAPNPGGLGGTYAGNPLGVAAAHAVLDIIEEEGLCDRAERLGQRLKQRLASLRDDVPEIVDIRGPGLMNAVEFNVAGSDRPNPEMTNRVREQALKRGLILLTCGVHGNVIRFLPPLTVPDAVFDEALGILEDSIRAARG

SEQ ID NO: 92-105 - skipped (14 entries)

SEQ ID NO: 106 - protein, 422 aa, Artificial Sequence
  Metagenomic
MTTMTDRKNAAISRGVGMTTQIYAERAENAEIWDREGRRYIDFAAGIAVVNTGHRHPKVVQAVKDQLDRFTHTCHQVVPYENYVSLAERLNELVPGDFEKKTIFATTGAEAVENAVKIARFATGRSAIIAFTGAFHGRTFMGMTLTGKVQPYKAGFGAMMPDVFHLPFPNELHGVSQDDALAALDKLFKADVDPARVAAIIVEPVQGEGGFYPVPSGFMQKLRALCDDNGILLIADEVQTGFARTGRLFAMELHGVAADITTMAKGLGGGLPISAVTGRAEIMDAPNPGGLGGTYAGNPLGVAAAHAVLDIIEEEGLCDRAERLGQRLKQRLASLRDDVPEIVDIRGPGLMNAVEFNVAGSDRPNPEMTNRVREEALERGLILLTCGVYGNVIRFLPPLTVPDAVFDEALGILEDSIRAARG

SEQ ID NO: 107 - skipped

SEQ ID NO: 108 - protein, 420 aa, Artificial Sequence
  Metagenomic
MKNQDLNTRRSLATPRGVGVMCDFYAVRAENATLWDAEGKEYIDFAGGIAVLNTGHLHPKVKAAVTAQLDNFTHTAYQIVPYEGYISLAERINRVAPIDGLKKTAFFTTGVEAVENAVKIARSATGRSGVIAFSGSFHGRTMLGMALTGKVAPYKLSFGPMPGDIYHVPFPNATQSISVADSLKALDLLFKVDIDPKRVAAIIIEPVQGEGGFNITPPELMTALRKVCDEHGILLIADEVQTGFGRTGKLFSMEHHSVQADIITMAKSLGGGFPISGVVGRAEIMDGPAAGGLGGTYAGNPLAVAAAHAVLDVIAEEKLCERAAELGDKLRAHLEGLRGKVAGIADVRGLGSMVALELNDAAGKPDAEAVKRVQKRALDAGLILLSCGVYGNVLRFLYPLTIPDAQFARALDILSEALAA

SEQ ID NO: 109-111 - skipped (3 entries)

SEQ ID NO: 112 - protein, 419 aa, Artificial Sequence
  Metagenomic
MTDRKNAAISRGVGMTTQIYAERAENAEIWDREGRRYIDFAAGIAVVNTGHRHPKVVQAVKDQLDRFTHTCHQVVPYENYVALAERLNDLVPGDFEKKTIFATTGAEAVENAVKIARFATGRSAIIAFTGAFHGRTFMGMTLTGKVQPYKAGFGAMMPDVFHLPFPNELHGVSQDDALAALDKLFKADVDPARVAAIIVEPVQGEGGFYPVPSGFMQKLRALCDDNGILLIADEVQTGFARTGRLFAMELHGVSADITTMAKGLGGGLPISAVTGRAEIMDAPNPGGLGGTYAGNPLGVAAAHAVLDIIEEEGLCDRAERLGQRLKQRLASLRDDVPEIVDIRGPGLMNAVEFNVAGSDRPNPEMTNRVREEALKRGLILLTCGVYGNVVRFLPPLTVPDAVFDEALGILEDSIRAARG

SEQ ID NO: 113-115 - skipped (3 entries)

SEQ ID NO: 116 - protein, 424 aa, Artificial Sequence
  Metagenomic
MKNDAISDRKNAAISRGVGMTTQIYADRAENSEIWDVEGRRYIDFSSGIAVVNTGHRHPKVIAAVKEQLDRFTHTCHQVVPYENYVHLAERLNSMLPGKFEKKTVFVTTGAEAVENAIKIARAATGRQAIVSFSGAFHGRTLLGMALTGKVVPYKVGFGAMPGDVFHVPFPVPLHGVSVADSLAALDRLFKADVDPNRVAAIIVEPVQGEGGFYEAPRELTTALRRICDQHGILLIADEVQTGFARTGKMFAMEHHDAAPDLTTMAKSLAGGFPLSAVTGRAELMDAPGPGGLGGTYAGNPLGIAAAHAVLDVIEEEKLCDRANTLGNRLKQRLESLRDDVPEIVDIRGPGFMNAIEFNDVAKGLPSAEIANAIRLKALDKGLILLTCGVYGNVIRFLAPITIQDNVMNEALDILESSIREAQA

SEQ ID NO: 117-132 - skipped (16 entries)

SEQ ID NO: 133 - protein, 471 aa, Artificial Sequence
  Saccharomyces cerevisiae
MSICEQYYPEEPTKPTVKTESIPGPESQKQLKELGEVFDTRPAYFLADYEKSLGNYITDVDGNTYLDLYAQISSIALGYNNPALIKAAQSPEMIRALVDRPALGNFPSKDLDKILKQILKSAPKGQDHVWSGLSGADANELAFKAAFIYYRAKQRGYDADFSEKENLSVMDNDAPGAPHLAVLSFKRAFHGRLFASGSTTCSKPIHKLDFPAFHWPHAEYPSYQYPLDENSDANRKEDDHCLAIVEELIKTWSIPVAALIIEPIQSEGGDNHASKYFLQKLRDITLKYNVVYIIDEVQTGVGATGKLWCHEYADIQPPVDLVTFSKKFQSAGYFFHDPKFIPNKPYRQFNTWCGEPARMIIAGAIGQEISDKKLTEQCSRVGDYLFKKLEGLQKKYPENFQNLRGKGRGTFIAWDLPTGEKRDLLLKKLKLNGCNVGGCAVHAVRLRPSLTFEEKHADIFIEALAKSVNEL

SEQ ID NO: 134 - protein, 450 aa, Artificial Sequence
  Clostridium viride
MLKNALPKIVTESLPGPKAKAIIDRRANAIPSAIRCVYPVVIDRGEGAMVEDVDGNHFLDWIGGVGVLNIGYSHPEVVDAVKKQTERYFHGMFNIVTHEGYVALAEKLSTLAPVLGKEKKAFFANSGAEANENAIKIAKAYTKRPNIIVFSGAFHGRTMLTMSMTSKKAYANGMGPFPDGVYRAKFPYYYRNPVGLPQEEAVNYYIESIKSVFEEASPPEHVAAIVVEPLQGEGGFIPAPIEWVKAVRQLCDQHGILLIADEVQTGFCRAGKMFASEYWQGAGASPDILTTAKSIAAGVPISAIVARNEIMDAVPAGIIGGTYCGNPLACAAALKVIEVMERDKFAQRSTEIGKIAMERFQQFKQNYPVVGDVRGLGSMIGLEFVKDPVSKEPNAPFVNALVQEAVKRGLMIENAGTYGNVIRFLAPLTITDEQLYAGLDIMEESIKALL

SEQ ID NO: 135 - protein, 441 aa, Artificial Sequence
  Gulosibacter molinativorax
MEFRLEQQRKIVTEIPGPKSEELLKRRQQYVSSSIGSSLPVYIGEADGAILRDVDGNQFIDFGSGIGVTTVGNANPKVVKAIQDAAAASTHLQINTAPYGSYVDLCQKLTELTPGDFPKKAALFNSGAEAVENAVKIARKYTGRDAVIVFDHAFHGRTNLTMAMTSKSMPYKDGFGPFAPEVYRAPLSYPFRDELSGPEAAARTIDVIDKQVGAKNVAAIIIEPIVGEGGFIVPAEGFLPALVEYANENGIVFVADEVQAGMSRTGKWFCSEWEGIEPDLVTSAKGIAGGMPLSAVVGRAEIMDAPHTGGIGGTYAGNPVANAAALATIASYEEDGLQEAALRIEKTIRGVLEPLVDELDVVGEVRGRGAMLAIELVTGADKTPNPELVKTVVAEAQAQGVVFLTCGTYGNVIRFLPPLVITDELLTDGLNVLVDAIRKNA

SEQ ID NO: 136 - protein, 447 aa, Artificial Sequence
  Kocuria rhizophila
MAEIEYRLPQKRELVTSIPGPKSQSLAERRAQTVAAGVASSLPVFADELDGGVIKDVDGNQMVDLGSGIAVTSVGASNPKVVARVQDAVAKFTHTCFMVTPYEDYVAVGEKMAQLTPGSFDKRTALFTSGSEAVENAVKIARVRTKRQAVVVFDHAYHGRTNLTMAMTAKVMPYKQGFGPFANEVYRVPMSYPFRDPEGMTGTEAAKRALTMVEKQVGAENVAAVVIEPIQGEGGFIVPAEGFLPALSSWCRENGAVFVADEVQAGIARTGAWFASEHEGVEPDLVTFAKGIAGGMPLSGVVGRAEIMDAVHPGGLGGTYGGNPVACAAALGALEAIEEWDLVARAQEIEKVIREELGSVAESSPVVGDLRGRGAMIALEFVKPGTTEPNPDAAKQIAARCLEQGVAILTCGTYGNIVRLLPPLVIDMDLLRDALGVFAAAIQEVGA

SEQ ID NO: 137 - protein, 468 aa, Artificial Sequence
  Arthrobacter sp. FB24
MVELVETRTGTHQKGIPMTATAPDITYRLEQKRRVQADFPGPKSVALTERRKAVVAAGVASSVPVFVSDADGGIIHDVDGNSFIDLGSGIAVTSVGASDPAVVGAVKEAVEHFTHTCFMVTPYEGYVAVAEQLNRLTPGDHEKRTVLFNSGAEAVENAVKVARLATGRDAVVAFDHAYHGRTNLTMALTAKAMPYKTNFGPFAPEVYRMPMSYPFREENPAITGAEAAKRAITAIEKQIGGEQVAAIIIEPIQGEGGFIVPADGFLPALAAWAKEKGIVFIADEVQSGFCRTGEWFAVNHEGVVPDIITMAKGIAGGMPLSAITGRADLLDAVHPGGLGGTYGGNPVACAAALASIGSMEEYDLNARAKHIEELATGRLRELQGEVSVIGDIRGRGAMLAIELVQAGSKEPNPELTKAVAAACLKEGVIILTCGTYGNVIRLLPPLVIGDELLLDGLEVLAAAIKAHA

SEQ ID NO: 138 - protein, 426 aa, Artificial Sequence
  Pseudomonas sp. AAC
MSKTNESLLQRRQAAVPRGVGQIHPVVAERAENATVWDVEGREYIDFAGGIAVLNTGHLHPKVVAAVQEQLTKLSHTCFQVLAYEPYIELAEEIAKRVPGNFPKKTLLVTSGSEAVENAVKIARAATGRAGVIAFTGAYHGRTMMTLGLTGKVVPYSAGMGLMPGGIFRALAPCELHGISEDESIASIERIFKNDAQPRDIAAIIIEPVQGEGGFYVNSKPFMQRLRALCDEHGILLIADEVQTGAGRTGTFFATEQLGIVPDLTTFAKSVGGGFPISGVVGKAEIMDAIAPGGLGGTYAGSPIACAAALAVLKVFDEEKLLERSQAVGETLKAGLREIQAKHKVIGDVRGLGSMVAIELFEGGDVNKPAAELVSKIVVRAREKGLILLSCGTYYNVIRFLMPVTIPDAQLKQGLAILAECFDELA

SEQ ID NO: 139 - protein, 426 aa, Artificial Sequence
  Pseudomonas putida KG-4
MSKTNESLMQRRVAAVPRGVGQIHPIFAESARNATVTDVEGREFIDFAGGIAVLNTGHVHPKIIAAVEAQLHKLTHTCFQVLAYEPYVEVCEKINALIPGDFAKKTLLVTTGSEAVENAIKIARAATGRAGVIAFTGAYHGRTMMTLGLTGKVVPYSAGMGLMPGGIFRAIYPNELHGVSIDDSIASIERIFKNDAEAKDIAAIILEPVQGEGGFYVAPKEFMKRLRALCDQHGILLIADEVQTGAGRTGTFFAMEQMGVAPDLTTFAKSIAGGFPLAGVCGKAEYMDAIAPGGLGGTYAGSPIACAAALAVMEVFEEEKLLDRSKAVGERLVTGLRKIQDKHPIIGDVRALGSMIAVEVFDKAGSHTPNPTAVAAVVAKARDKGLILLSCGTYGNVLRILVPLTSPDEQLDKGLAIIEECFAELA

SEQ ID NO: 140 - protein, 442 aa, Artificial Sequence
  Alcaligenes A. faecalis
MSKDKAMLNAFDPAAADSLPAAERALIERRQRVLGTAYRLFYDNPLHIVRGEGVWLYDAAGERYLDAYNNVASVGHSHPRVVAAIAEQAAILNTHTRYLHDGVVEYAERLVATFPSALSQAMFTCTGSEANDLALRIARSHTGASGVIVTELAYHGVTAAVAAVSPSLGKTVPLGVDVRAVSAPDTYRHDPATIGVWFAARVQEAIDDMLRHGIRPAALLVDTVFSSDGVYTDPAPFLAPAVEAIRAAGGLFIADEVQAGFARTGSCMWGFQRHGLVPDIVTMGKPMGNGHPIAGVVARPEIFERFGRDARYFNTFGGNPVSCAAALATLDVIQDEGLQANAARTGAYLRDKFREMARKHSWIGDVRGDGLFMGIELVKDQAAKTPATEETHRFVNLMREHRVLLSATGLRGNVIKLRPQLPFSLENADQLMQAADEVFAKL

SEQ ID NO: 141 - protein, 453 aa, Artificial Sequence
  Clostridium kluyveri DSM555
MSNEVSIKELIEKAKVAQKKLEAYSQEQVDVLVKALGKVVYDNAEMFAKEAVEETEMGVYEDKVAKCHLKSGAIWNHIKDKKTVGIIKEEPERALVYVAKPKGVVAATTPITNPVVTPMCNAMAAIKGRNTIIVAPHPKAKKVSAHTVELMNAELKKLGAPENIIQIVEAPSREAAKELMESADVVIATGGAGRVKAAYSSGRPAYGVGPGNSQVIVDKGYDYNKAAQDIITGRKYDNGIICSSEQSVIAPAEDYDKVIAAFVENGAFYVEDEETVEKFRSTLFKDGKINSKIIGKSVQIIADLAGVKVPEGTKVIVLKGKGAGEKDVLCKEKMCPVLVALKYDTFEEAVEIAMANYMYEGAGHTAGIHSDNDENIRYAGTVLPISRLVVNQPATTAGGSFNNGFNPTTTLGCGSWGRNSISENLTYEHLINVSRIGYFNKEAKVPSYEEIWG

SEQ ID NO: 142 - protein, 451 aa, Artificial Sequence
  Porphyromonas gingivalis W83
MEIKEMVSLARKAQKEYQATHNQEAVDNICRAAAKVIYENAAILAREAVDETGMGVYEHKVAKNQGKSKGVWYNLHNKKSIGILNIDERTGMIEIAKPIGVVGAVTPTTNPIVTPMSNIIFALKTCNAIIIAPHPRSKKCSAHAVRLIKEAIAPFNVPEGMVQIIEEPSIEKTQELMGAVDVVVATGGMGMVKSAYSSGKPSFGVGAGNVQVIVDSNIDFEAAAEKIITGRAFDNGIICSGEQSIIYNEADKEAVFTAFRNHGAYFCDEAEGDRARAAIFENGAIAKDVVGQSVAFIAKKANINIPEGTRILVVEARGVGAEDVICKEKMCPVMCALSYKHFEEGVEIARTNLANEGNGHTCAIHSNNQAHIILAGSELTVSRIVVNAPSATTAGGHIQNGLAVTNTLGCGSWGNNSISENFTYKHLLNISRIAPLNSSIHIPDDKEIWEL

SEQ ID NO: 143 - protein, 463 aa, Artificial Sequence
  Clostridium difficile 630
MEKAVENFEDLSKEYINGYIERARKAQREFECYTQEQVDKIVKIVGKVVYYNAEYLAKLAVEETGMGVYEDKVAKNKSKAKVIYNNLKDKKSVGIIDIDRETGITKVAKPVGVVAAITPCTNPIVTPMSNAMFALKGRNAIIITPHHKAIGCSTKTVEMINEELEKIGAPENLIQILDQQSRENTRNLISSADVVIATGGMGMVKAAYSSGKPALGVGAGNVQCIIDRDVDIKEAVPKIIAGRIFDNGIICSGEQSVIVAEEMFDKIMDEFKNNKGFIVRDKVQKEAFRNAMFVNKSMNKDAVGQSVHTIAKIAGVEIPEDTKIIVIEADGPGEEDIIAKEKMCPVISAYKYKSFEEGVAIAKANLNVEGKGHSVSIHSNTVKNIEYAGENIEVSRFVINQCCATSAGGSFFNGLAPTNTLGCGSWGNNSISENLDYKHLINISRIAYYMPENEVPTDEELWG

SEQ ID NO: 144 - protein, 364 aa, Artificial Sequence
  Candida tropicalis
MITAQAVLYTQHGEPKDVLFTQSFEIDDDNLAPNEVIVKTLGSPVNPSDINQIQGVYPSKPAKTTGFGTTEPAAPCGNEGLFEVIKVGSNVLSLEAGDWVIPSHVNFGTWRTHALGNDDDFIKLPNPAQSKANGKPNGLTINQGATISVNPLTAYLMLTHYVKLTPGKDWFIQNGGTSAVGKYASQIGKLLNFNSISVIRDRPNLDEVVASLKELGATQVITEDQNNSREFGPTIKEWIKQSGGEAKLALNCVGGKSSTGIARKLNNNGLMLTYGGMSFQPVTIPTSLYIFKNFTSAGFWVTELLKNNKELKTLTLNQIIAWYEEGKLTDAKSIETLYDGTKPLHELYQDGVANSKDGKQLITY

SEQ ID NO: 145 - protein, 340 aa, Artificial Sequence
  Drosophila melanogaster
MMSVVAKSLKYTQHGEPQEVLQLVEDKLPDPKDNQVLVKILAAPINPADINTIQGKYPVKPKFPAVGGNECVAEVICVGDKVKGFEAGQHVIPLASGLGTWTTHAVYKEDQLLIVSKKVGLAEAATSTVNPTTAYRMLKDFVQLCPGDTVIQNGANSAVGQAVHQLCRAWGINSVGIVRDRPEIAELKQMLQCLGATEVLTEAEIRTSDIFKSGKLKKPRLAFNCVGGKSATEVSRHLDNGGVLVTYGGMSREPVTVATGPLIFKDIAFRGFWMTRWSKENYSSPERSKMFKEIFELMEQGKFVAPNHEMVPLAKFKDAAAAALSFKGFTGKKYILDMSI

SEQ ID NO: 146 - DNA, 1266 bp, Artificial Sequence
  Nucleic Acid Sequence of SEQ ID NO: 1
atgaagaatcaggacctgaatacccgccgttccctggccacgccgcgcggcgtcggcgtcatgtgcgacttctacgcggtgcgcgccgaaaacgccaccctgtgggacgccaatggcaaggaatacatcgatttcgcaggcggcatcgccgtcctgaacacgggccacctgcacccgaagatcaaggccgccgttgccgcgcagctggacaacttcacgcacacggcctaccagatcgtgccgtacgaaggctatgtctcgctggccgagcgcatcaaccgcctcgcccccatcgacggcctgaagaagagcgccttcttcaccaccggcgtggaagccgtcgaaaacgccgtcaagatcgcgcgttcggccaccggccgctcgggcgtcatcgccttctcgggctcgttccacggccgcaccatgctgggcatggcgctgactggcaaggtcgccccgtacaagctgtcgttcggtccgatgccgggcgacatctatcacgtgcccttccccaacgccacccagtccatcagcgtggcggactcgctcaaggcgctggacctgctgttcaagtgcgacatcgatcccaagcgcgtcgcggccatcatcatcgaaccggtgcagggtgaaggcggcttcaacatcaccccgcccgagttgatgacggcgctgcgcaaggtctgcgacgagcacggcattctgctgatcgccgacgaagtccagaccggcttcggccgcaccggcaagctgttcgccatggagcaccactcggtccaggccgacctgatcaccatggccaagagcctgggcggcggcttcccgatatcgggcgtggtcggccgcgccgacgtcatggacgcgcccgccgccggcggcctgggcggcacctacgccggcaacccgctggcggtcgccgcggcgcatgccgtgctggacgtgatcgccgaggaaaagctgtgcgaacgcgccgacgccctgggcgacaagctgcgcgcgcatctggaaggcctgcgcgccaaggttccgggcatcgccgacgtgcgcggcctgggttccatggtcgccctggaactgaacgatcccgccaccggcaagccggacgcggaagcggtcaagcgcgtgcaagcccgcgccatcgaaaagggcctgattttgctaagctgcggtgtgtacggcaacgtcctgcgcttcctgtaccccttgaccatccccgacgcccagttcgatcgcgcgctggccatcctgtccgaggcgcttgccgcctga

SEQ ID NO: 147 - DNA, 1266 bp, Artificial Sequence
  Nucleic Acid Sequence of SEQ ID NO: 1-Codon Optimized
atgaaaaatcaggatctgaatacccgtcgtagcctggcaacaccgcgtggtgtgggtgttatgtgtgatttttatgcagttcgtgcagaaaatgcaaccctgtgggatgcaaatggcaaagaatatattgattttgccggtggtattgccgtgctgaataccggtcatctgcatccgaaaatcaaagcagcagttgcagcacagctggataactttacccataccgcatatcagattgttccgtatgaaggttatgttagcctggccgaacgtattaatcgtctggcaccgattgatggtctgaaaaaatcagcattttttaccaccggtgtggaagcagttgaaaatgcagttaaaattgcacgtagcgcaaccggtcgtagcggtgttattgcatttagcggtagctttcatggtcgtaccatgctgggtatggcactgaccggtaaagttgcaccgtataaactgagctttggtccgatgcctggtgatatttatcatgttccgtttccgaatgccacccagagcattagcgttgcagatagcctgaaagcactggatctgctgtttaaatgtgatattgatccgaaacgtgtggcagccattattatcgaaccggtgcagggtgaaggtggttttaacattacccctccggaactgatgaccgcactgcgtaaagtttgtgatgaacatggtattctgctgattgcagatgaagttcagaccggttttggtcgcaccggtaaactgtttgcaatggaacatcatagcgttcaggcagatctgattaccatggcaaaaagcctgggtggtggttttccgattagcggtgtggttggtcgtgcagatgttatggatgcaccggcagcgggtggtctgggtggtacatatgcaggtaatccgctggcagttgccgcagcacatgcagttctggatgttattgccgaagaaaaactgtgtgaacgtgccgatgcactgggcgataaactgcgtgcacatctggaaggtctgcgtgcaaaagttccgggtattgcggatgttcgcggtctgggtagcatggttgcactggaactgaatgatccggcaaccggcaaaccggatgccgaagcagttaaacgtgttcaggcacgtgcgattgaaaaaggtctgattctgctgtcatgtggtgtttatggtaatgttctgcgttttctgtatccgctgaccattccggatgcacagtttgatcgtgcactggcaattctgagcgaagcactggcagcatag

SEQ ID NO: 148 - DNA, 1266 bp, Artificial Sequence
  Nucleic Acid Sequence of SEQ ID NO: 1-Codon Optimized
atgaaaaatcaggatctgaatacccgtcgtagcctggcaacaccgcgtggtgtgggtgttatgtgtgatttttatgcagttcgtgcagaaaatgcaaccctgtgggatgcaaatggcaaagaatatattgattttgccggtggtattgccgtgctgaataccggtcatctgcatccgaaaatcaaagcagcagttgcagcacagctggataactttacccataccgcatatcagattgttccgtatgaaggttatgttagcctggccgaacgtattaatcgtctggcaccgattgatggtctgaaaaaatcagcattttttaccaccggtgtggaagcagttgaaaatgcagttaaaattgcacgtagcgcaaccggtcgtagcggtgttattgcatttagcggtagctttcatggtcgtaccatgctgggtatggcactgaccggtaaagttgcaccgtataaactgagctttggtccgatgcctggtgatatttatcatgttccgtttccgaatgccacccagagcattagcgttgcagatagcctgaaagcactggatctgctgtttaaatgtgatattgatccgaaacgtgtggcagccattattatcgaaccggtgcagggtgaaggtggttttaacattacccctccggaactgatgaccgcactgcgtaaagtttgtgatgaacatggtattctgctgattgcagatgaagttcagaccggttttggtcgcaccggtaaactgtttgcaatggaacatcatagcgttcaggcagatctgattaccatggcaaaaagcctgggtggtggttttccgattagcggtgtggttggtcgtgcagatgttatggatgcaccggcagcgggtggtctgggtggtacatatgcaggtaatccgctggcagttgccgcagcacatgcagttctggatgttattgccgaagaaaaactgtgtgaacgtgccgatgcactgggcgataaactgcgtgcacatctggaaggtctgcgtgcaaaagttccgggtattgcggatgttcgcggtctgggtagcatggttgcactggaactgaatgatccggcaaccggcaaaccggatgccgaagcagttaaacgtgttcaggcacgtgcgattgaaaaaggtctgattctgctgtcatgtggtgtttatggtaatgttctgcgttttctgtatccgctgaccattccggatgcacagtttgatcgtgcactggcaattctgagcgaagcactggcagcataa

SEQ ID NO: 149 - DNA, 1266 bp, Artificial Sequence
  Nucleic Acid Sequence of SEQ ID NO: 1-Codon Optimized
atgaaaaatcaggacttaaacacccgtcgcagcttagccactcctcgcggggtcggggtcatgtgcgacttctatgcagtgcgtgccgagaacgcgacgctgtgggatgccaacggcaaagaatatatcgattttgcgggcggtattgccgtgttgaatacgggccacctgcatcctaagataaaggcagctgtcgcggcgcaactggataatttcacgcacaccgcatatcaaatcgtaccatacgaagggtacgtatcgctggccgaaagaattaaccgtttggccccgattgacggtctaaaaaaaagcgcgtttttcacaaccggtgtggaagcagtcgaaaacgcggtaaaaatcgcgcgtagcgccactggccgctccggtgttatcgcgttcagcggaagtttccatggccgcactatgttaggcatggcgctgactgggaaagttgcgccgtataaactgagctttgggccgatgcctggcgatatttatcacgttccattccctaacgccactcagtctatttcagtcgccgattctttgaaagcattagacctgctgtttaaatgcgatattgatcccaaacgcgtagcagccataattattgagccggttcagggagagggcggcttcaatatcacaccaccggaactcatgacggccctgcgtaaggtatgcgacgaacatggtattctcctgattgcagatgaagtacagaccggatttggccgcaccggtaaactgtttgctatggagcaccactctgtgcaagctgatctgatcacgatggccaaaagtttaggcggtggcttcccgatctctggcgtagtgggtcgggcagatgtcatggatgcgcccgcagcgggagggttaggtggtacttatgctggtaatcctttggctgtagcagcagcgcacgcagttcttgacgtgattgcagaagaaaagttatgtgaacgcgccgatgcattaggtgacaaattgcgggcacatctggagggtctgcgcgcgaaagttcctggcattgcggatgtccgcggtttgggcagcatggtggcactggaactgaacgacccggctacgggcaaacccgacgcagaagccgtaaaacgtgttcaggcgcgtgccattgaaaaaggcttaattttactgagctgcggcgtctacgggaatgtgttacgtttcctgtacccgctgaccattccggatgcgcaatttgaccgggccttagcgattctgtctgaggccctggcagcatag

SEQ ID NO: 150 - protein, 1168 aa, Artificial Sequence
  Mycolicibacterium smegmatis MC2 155
MTIETREDRFNRRIDHLFETDPQFAAARPDEAISAAAADPELRLPAAVKQILAGYADRPALGKRAVEFVTDEEGRTTAKLLPRFDTITYRQLAGRIQAVTNAWHNHPVNAGDRVAILGFTSVDYTTIDIALLELGAVSVPLQTSAPVAQLQPIVAETEPKVIASSVDFLADAVALVESGPAPSRLVVFDYSHEVDDQREAFEAAKGKLAGTGVVVETITDALDRGRSLADAPLYVPDEADPLTLLIYTSGSTGTPKGAMYPESKTATMWQAGSKARWDETLGVMPSITLNFMPMSHVMGRGILCSTLASGGTAYFAARSDLSTFLEDLALVRPTQLNFVPRIWDMLFQEYQSRLDNRRAEGSEDRAEAAVLEEVRTQLLGGRFVSALTGSAPISAEMKSWVEDLLDMHLLEGYGSTEAGAVFIDGQIQRPPVIDYKLVDVPDLGYFATDRPYPRGELLVKSEQMFPGYYKRPEITAEMFDEDGYYRTGDIVAELGPDHLEYLDRRNNVLKLSQGEFVTVSKLEAVFGDSPLVRQIYVYGNSARSYLLAVVVPTEEALSRWDGDELKSRISDSLQDAARAAGLQSYEIPRDFLVETTPFTLENGLLTGIRKLARPKLKAHYGERLEQLYTDLAEGQANELRELRRNGADRPVVETVSRAAVALLGASVTDLRSDAHFTDLGGDSLSALSFSNLLHEIFDVDVPVGVIVSPATDLAGVAAYIEGELRGSKRPTYASVHGRDATEVRARDLALGKFIDAKTLSAAPGLPRSGTEIRTVLLTGATGFLGRYLALEWLERMDLVDGKVICLVRARSDDEARARLDATFDTGDATLLEHYRALAADHLEVIAGDKGEADLGLDHDTWQRLADTVDLIVDPAALVNHVLPYSQMFGPNALGTAELIRIALTTTIKPYVYVSTIGVGQGISPEAFVEDADIREISATRRVDDSYANGYGNSKWAGEVLLREAHDWCGLPVSVFRCDMILADTTYSGQLNLPDMFTRLMLSLVATGIAPGSFYELDADGNRQRAHYDGLPVEFIAEAISTIGSQVTDGFETFHVMNPYDDGIGLDEYVDWLIEAGYPVHRVDDYATWLSRFETALRALPERQRQASLLPLLHNYQQPSPPVCGAMAPTDRFRAAVQDAKIGPDKDIPHVTADVIVKYISNLQMLGLL

SEQ ID NO: 151 - protein, 1174 aa, Artificial Sequence
  Mycolicibacterium smegmatis MC2 155
MGTSDVHDATDGVTETALDDEQSTRRIAELYATDPEFAAAAPLPAVVDAAHKPGLRLAEILQTLFTGYGDRPALGYRARELATDEGGRTVTRLLPRFDTLTYAQVWSRVQAVAAALRHNFAQPIYPGDAVATIGFASPDYLTLDLVCAYLGLVSVPLQHNAPVSRLAPILAEVEPRILTVSAEYLDLAVESVRDVNSVSQLVVFDHHPEVDDHRDALARAREQLAGKGIAVTTLDAIADEGAGLPAEPIYTADHDQRLAMILYTSGSTGAPKGAMYTEAMVARLWTMSFITGDPTPVINVNFMPLNHLGGRIPISTAVQNGGTSYFVPESDMSTLFEDLALVRPTELGLVPRVADMLYQHHLATVDRLVTQGADELTAEKQAGAELREQVLGGRVITGFVSTAPLAAEMRAFLDITLGAHIVDGYGLTETGAVTRDGVIVRPPVIDYKLIDVPELGYFSTDKPYPRGELLVRSQTLTPGYYKRPEVTASVFDRDGYYHTGDVMAETAPDHLVYVDRRNNVLKLAQGEFVAVANLEAVFSGAALVRQIFVYGNSERSFLLAVVVPTPEALEQYDPAALKAALADSLQRTARDAELQSYEVPADFIVETEPFSAANGLLSGVGKLLRPNLKDRYGQRLEQMYADIAATQANQLRELRRAAATQPVIDTLTQAAATILGTGSEVASDAHFTDLGGDSLSALTLSNLLSDFFGFEVPVGTIVNPATNLAQLAQHIEAQRTAGDRRPSFTTVHGADATEIRASELTLDKFIDAETLRAAPGLPKVTTEPRTVLLSGANGWLGRFLTLQWLERLAPVGGTLITIVRGRDDAAARARLTQAYDTDPELSRRFAELADRHLRVVAGDIGDPNLGLTPEIWHRLAAEVDLVVHPAALVNHVLPYRQLFGPNVVGTAEVIKLALTERIKPVTYLSTVSVAMGIPDFEEDGDIRTVSPVRPLDGGYANGYGNSKWAGEVLLREAHDLCGLPVATFRSDMILAHPRYRGQVNVPDMFTRLLLSLLITGVAPRSFYIGDGERPRAHYPGLTVDFVAEAVTTLGAQQREGYVSYDVMNPHDDGISLDVFVDWLIRAGHPIDRVDDYDDWVRRFETALTALPEKRRAQTVLPLLHAFRAPQAPLRGAPEPTEVFHAAVRTAKVGPGDIPHLDEALIDKYIRDLREFGLI

SEQ ID NO: 152 - protein, 1173 aa, Artificial Sequence
  Mycobacterium avium
MSTATHDERLDRRVHELIATDPQFAAAQPDPAITAALEQPGLRLPQIIRTVLDGYADRPALGQRVVEFVTDAKTGRTSAQLLPRFETITYSEVAQRVSALGRALSDDAVHPGDRVCVLGFNSVDYATIDMALGAIGAVSVPLQTSAAISSLQPIVAETEPTLIASSVNQLSDAVQLITGAEQAPTRLVVFDYHPQVDDQREAVQDAAARLSSTGVAVQTLAELLERGKDLPAVAEPPADEDSLALLIYTSGSTGAPKGAMYPQSNVGKMWRRGSKNWFGESAASITLNFMPMSHVMGRSILYGTLGNGGTAYFAARSDLSTLLEDLELVRPTELNFVPRIWETLYGEFQRQVERRLSEAGDAGERRAVEAEVLAEQRQYLLGGRFTFAMTGSAPISPELRNWVESLLEMHLMDGYGSTEAGMVLFDGEIQRPPVIDYKLVDVPDLGYFSTDRPHPRGELLLRTENMFPGYYKRAETTAGVFDEDGYYRTGDVFAEIAPDRLVYVDRRNNVLKLAQGEFVTLAKLEAVFGNSPLIRQIYVYGNSAQPYLLAVVVPTEEALASGDPETLKPKIADSLQQVAKEAGLQSYEVPRDFIIETTPFSLENGLLTGIRKLAWPKLKQHYGERLEQMYADLAAGQANELAELRRNGAQAPVLQTVSRAAGAMLGSAASDLSPDAHFTDLGGDSLSALTFGNLLREIFDVDVPVGVIVSPANDLAAIASYIEAERQGSKRPTFASVHGRDATVVRAADLTLDKFLDAETLAAAPNLPKPATEVRTVLLTGATGFLGRYLALEWLERMDMVDGKVIALDILASDEEARARLDKTFDSGDPKLLAHYQQLAADHLEVIAGDKGEANLGLGQDVWQRLADTVDVIVDPAALVNHVLPYSELFGPNALGTAELIRLALTSKQKPYTYVSTIGVGDQIEPGKFVENADIRQMSATRAINDSYANGYGNSKWAGEVLLREAHDLCGLPVAVFRCDMILADTTYAGQLNLPDMFTRLMLSLVATGIAPGSFYELDADGNRQRAHYDGLPVEFIAAAISTLGSQITDSDTGFQTYHVMNPYDDGVGLDEYVDWLVDAGYSIERIADYSEWLRRFETSLRALPDRQRQYSLLPLLHNYRTPEKPINGSIAPTDVFRAAVQEAKIGPDKDIPHVSPPVIVKYITDLQLLGLL

SEQ ID NO: 153 - protein, 1173 aa, Artificial Sequence
  Mycobacterium avium
MSTATHDERLDRRVHELIATDPQFAAAQPDPAITAALEQPGLRLPQIIRTVLDGYADRPALGQRVVEFVTDAKTGRTSAQLLPRFETITYSEVAQRVSALGRALSDDAVHPGDRVCVLGFNSVDYATIDMALGAIGAVSVPLQTSAAISSLQPIVAETEPTLIASSVNQLSDAVQLITGAEQAPTRLVVFDYHPQVDDQREAVQDAAARLSSTGVAVQTLAELLERGKDLPAVAEPPADEDSLALLIYTSGSTGAPKGAMYPQSNVGKMWRRGSKNWFGESAASITLNFMPMSHVMGRSILYGTLGNGGTAYFAARSDLSTLLEDLELVRPTELNFVPRIWETLYGEFQRQVERRLSEAGDAGERRAVEAEVLAEQRQYLLGGRFTFAMTSSAPISPELRNWVESLLEMHLMDGYGSTEAGMVLFDGEIQRPPVIDYKLVDVPDLGYFSTDRPHPRGELLLRTENMFPGYYKRAETTAGVFDEDGYYRTGDVFAEIAPDRLVYVDRRNNVLKLAQGEFVTLAKLEAVFGNSPLIRQIYVYGNSAQPYLLAVVVPTEEALASGDPETLKPKIADSLQQVAKEAGLQSYEVPRDFIIETTPFSLENGLLTGIRKLAWPKLKQHYGERLEQMYADLAAGQANELAELRRNGAQAPVLQTVSRAAGAMLGSAASDLSPDAHFTDLGGDSLSALTFGNLLREIFDVDVPVGVIVSPANDLAAIASYIEAERQGSKRPTFASVHGRDATVVRAADLTLDKFLDAETLAAAPNLPKPATEVRTVLLTGATGFLGRYLALEWLERMDMVDGKVIALVRARSDEEARARLDKTFDSGDPKLLAHYQQLAADHLEVIAGDKGEANLGLGQDVWQRLADTVDVIVDPAALVNHVLPYSELFGPNALGTAELIRLALTSKQKPYTYVSTIGVGDQIEPGKFVENADIRQMSATRAINDSYANGYGNSKWAGEVLLREAHDLCGLPVAVFRCDMILADTTYAGQLNLPDMFTRLMLSLVATGIAPGSFYELDADGNRQRAHYDGLPVEFIAAAISTLGSQITDSDTGFQTYHVMNPYDDGVGLDEYVDWLVDAGYSIERIADYSEWLRRFETSLRALPDRQRQYSLLPLLHNYRTPEKPINGSIAPTDVFRAAVQEAKIGPDKDIPHVSPPVIVKYITDLQLLGLL

SEQ ID NO: 154 - protein, 1174 aa, Artificial Sequence
  Mycobacterium marinum M
MSPITREERLERRIQDLYANDPQFAAAKPATAITAAIERPGLPLPQIIETVMTGYADRPALAQRSVEFVTDAGTGHTTLRLLPHFETISYGELWDRISALADVLSTEQTVKPGDRVCLLGFNSVDYATIDMTLARLGAVAVPLQTSAAITQLQPIVAETQPTMIAASVDALADATELALSGQTATRVLVFDHHRQVDAHRAAVESARERLAGSAVVETLAEAIARGDVPRGASAGSAPGTDVSDDSLALLIYTSGSTGAPKGAMYPRRNVATFWRKRTWFEGGYEPSITLNFMPMSHVMGRQILYGTLCNGGTAYFVAKSDLSTLFEDLALVRPTELTFVPRVWDMVFDEFQSEVDRRLVDGADRVALEAQVKAEIRNDVLGGRYTSALTGSAPISDEMKAWVEELLDMHLVEGYGSTEAGMILIDGAIRRPAVLDYKLVDVPDLGYFLTDRPHPRGELLVKTDSLFPGYYQRAEVTADVFDADGFYRTGDIMAEVGPEQFVYLDRRNNVLKLSQGEFVTVSKLEAVFGDSPLVRQIYIYGNSARAYLLAVIVPTQEALDAVPVEELKARLGDSLQEVAKAAGLQSYEIPRDFIIETTPWTLENGLLTGIRKLARPQLKKHYGELLEQIYTDLAHGQADELRSLRQSGADAPVLVTVCRAAAALLGGSASDVQPDAHFTDLGGDSLSALSFTNLLHEIFDIEVPVGVIVSPANDLQALADYVEAARKPGSSRPTFASVHGASNGQVTEVHAGDLSLDKFIDAATLAEAPRLPAANTQVRTVLLTGATGFLGRYLALEWLERMDLVDGKLICLVRAKSDTEARARLDKTFDSGDPELLAHYRALAGDHLEVLAGDKGEADLGLDRQTWQRLADTVDLIVDPAALVNHVLPYSQLFGPNALGTAELLRLALTSKIKPYSYTSTIGVADQIPPSAFTEDADIRVISATRAVDDSYANGYSNSKWAGEVLLREAHDLCGLPVAVFRCDMILADTTWAGQLNVPDMFTRMILSLAATGIAPGSFYELAADGARQRAHYDGLPVEFIAEAISTLGAQSQDGFHTYHVMNPYDDGIGLDEFVDWLNESGCPIQRIADYGDWLQRFETALRALPDRQRHSSLLPLLHNYRQPERPVRGSIAPTDRFRAAVQEAKIGPDKDIPHVGAPIIVKYVSDLRLLGLL

SEQ ID NO: 155 - protein, 1180 aa, Artificial Sequence
  Mycobacterium liflandii 128FXT
MSITCVDTRAQRSARRIEQLYSTDAQFAAARPSTAVGIAISKSGLGLPQIIQTVMDGYPQRPALGQRATRVVTDPNTGRSSAQLLAEFETITYRELWNRTNALTNAFAAEALADRGQRVCVLGFASIDYATIDLALMLLGAVSVPLPTNAARAQLCHIVSETQPSLIASSTENLPDAISLVLSHRAPHRVVVFDYRPELDAHREALEAARARLAAIPVTVETLTAIIARGRTVRPAEADCGAQSADAPALLIYTSGSTGAPKGVVYTRNRVADFWRTSKAEVEATEQRTAPSITLNFMPMSHANGRQVLYGTLSNGGTAYFTARSDLSTLFDDLALVRPTELGFPPRIWDMLLERFGREVDRRLRDGTAEGADPGALKARVAADLRQVLLGGRYALAMMGSAPISEQMKASVESLLDLDVMEGYGSTEAGTVIINNEVQRPQVIDYKLVDVAELGYFLTDRPYPRGELLVKTRTLFSGYYRDPEDGAQVFDPDGFYRTGDIMAQVGPDRLAYLDRRNNVLKLSQGEFVAVSRLEAIFANSPLVRQIFVYANGARAYPLAVVVPTQDAQSRHGRAELKAELHTSLHRVAMSAGLAPYEIPRDFIVETTPFTPQNGLLTAIHKLARPHLTQRYGARLELLYTELADSQTRRLHRLRQTGGRLPALETIRRAAGALLGTETTEPRPEAHFKDLGGDSVSAVTFSNLLHDIYGFDVPVGVILGPATDLRALASHVESRRGAGWSGPSFASVHVPRATSVHAGDLKLAKFLDTKTLAAATSLPAADARARTVLLTGATGFLGRYLVLEWLRRLRAVGGKLICLVRAASDEQARVRLDTAFDSGDPQLPEHFRQLAVDRLEVLAGDKSEPGLGLDGPTWQRLADTVDLIVDPATLVNHVLSYRQLFAPNVAGTAELLRLALTTKRKPYAYVSTVSVANQIEPSAFTEDADIREISRTRTIDDSFANGYTTSKWASEVLLREAHDLCGLPVTVFRCDMILADTSYAGQLNLADTFTRLMLSVAATGIAPASFYRLGPDGKRQPAHFDGLPVEFIAEAVATLGARRHDGFQVHHVANPHHDGVGLDEYVDWLVDAGCPIRRIPDYDEWLSRFETALHALPDRKRRHSLLPLLQNYREPAEPIRGGIAPAPRFRGAVRQAKIGRDNDIPHVGPAIIAKYASDLQLLGLA

SEQ ID NO: 156 - protein, 1168 aa, Artificial Sequence
  Mycobacterium tuberculosis variant bovis BCG
MSINDQRLTRRVEDLYASDAQFAAASPNEAITQAIDQPGVALPQLIRMVMEGYADRPALGQRALRFVTDPDSGRTMVELLPRFETITYRELWARAGTLATALSAEPAIRPGDRVCVLGFNSVDYTTIDIALIRLGAVSVPLQTSAPVTGLRPIVTETEPTMIATSIDNLGDAVEVLAGHAPARLVVFDYHGKVDTHREAVEAARARLAGSVTIDTLAELIERGRALPATPIADSADDALALLIYTSGSTGAPKGAMYRESQVMSFWRKSSGWFEPSGYPSITLNFMPMSHVGGRQVLYGTLSNGGTAYYVAKSDLSTLFEDLALVRPTELCFVPRIWDMVFAEFHSEVDRRLVDGADRAALEAQVKAELRENVLGGRFVMALTGSAPISAEMTAWVESLLADVHLVEGYGSTEAGMVLNDGMVRRPAVIDYKLVDVPELGYFGTDQPYPRGELLVKTQTMFPGYYQRPDVTAEVFDPDGFYRTGDIMAKVGPDQFVYLDRRNNVLKLSQGEFIAVSKLEAVFGDSPLVRQIFIYGNSARAYPLAVVVPSGDALSRHGIENLKPVISESLQEVARAAGLQSYEIPRDFIIETTPFTLENGLLTGIRKLARPQLKKFYGERLERLYTELADSQSNELRELRQSGPDAPVLPTLCRAAAALLGSTAADVRPDAHFADLGGDSLSALSLANLLHEIFGVDVPVGVIVSPASDLRALADHIEAARTGVRRPSFASIHGRSATEVHASDLTLDKFIDAATLAAAPNLPAPSAQVRTVLLTGATGFLGRYLALEWLDRMDLVNGKLICLVRARSDEEAQARLDATFDSGDPYLVRHYRELGAGRLEVLAGDKGEADLGLDRVTWQRLADTVDLIVDPAALVNHVLPYSQLFGPNAAGTAELLRLALTGKRKPYIYTSTIAVGEQIPPEAFTEDADIRAISPTRRIDDSYANGYANSKWAGEVLLREAHEQCGLPVTVFRCDMILADTSYTGQLNLPDMFTRLMLSLAATGIAPGSFYELDAHGNRQRAHYDGLPVEFVAEAICTLGTHSPDRFVTYHVMNPYDDGIGLDEFVDWLNSPTSGSGCTIQRIADYGEWLQRFETSLRALPDRQRHASLLPLLHNYREPAKPICGSIAPTDQFRAAVQEAKIGPDKDIPHLTAAIIAKYISNLRLLGLL

SEQ ID NO: 157 - protein, 1148 aa, Artificial Sequence
  Streptomyces griseus subsp. griseus NBRC 13350
MAEPLDAATASAHDPGQGLAEALAAVEPGRALAEVMASVLEGHGDRPALGERAREPETGRLLPHFDTISYRELWSRVRALAGRWHHDPEYPLGPGDRICTLGFTSTDYATLDLACIHLGAVPVPLPSNAPLPRLAPVVEESGPTVLAASVDRLDTAIDVVLASSTIRRLLVFDDGPGATRPGGALAAARQRLSGSPVTVDTLAGLIDRGRDLPPPPLYIPDPGEDPLALLIYTSGSTGAPKGAMYTQRLLGTAWYGFSYGAADTPAISVLYLPQSHLAGRYAVMGSLVKGGTGYFTAADDLSTLFEDIALVRPTELTMVPRLCDMLLQHYRSERDRRADEPGDIEAAVTKAVREDFLGGRVAKAFVGTAPLSAELTAFVESVLGFHLYTGYGSTEAGGVLLDTVVQRPPVTDYKLVDVPELGYYATDLPHPRGELLLKSHTLIPGYYRRPDLTAAIFDADGYYRTGDVFAETGPDRLVYVDRTKDTLKLSQGEFVAVSRLETVLLDSPLVQHLYLYGNSERAYLLAVVVPTPDALAGCGGDTEALRPLLMESLRSVARRAGLNAYEIPRGILVEPEPFSPENGLFTESHKLLRPRLKERYGPALELLYDRLADGQDRRLRELRRTGADRPVQETVLRAAQALLGSPGSDLRPGAHFTDLGGDSLSAVSFSELMKEIFHVDVPVGAIIGPAADLAEVARYITAARRPAGAPRPTPASVHGEHRTEVRAGDLAPEKFLDAPTLAAAPALPRPDGDVRTVLLTGATGYLGRFLCLEWLERLAPSGGRLVCLVRGSDATVAARRLEAAFDSGDTALLRRYRKAAGKTLDVVAGDIGEPLLGLAEETWRELAGAVDLIVHPAALVNHLLPYGELFGPNVVGTAEAIRLALTTRLKPVNHVSTVAVCLGTPAETADENADIRAAVPVRTTGQGYADGYATSKWAGEVLLREAHERYGLPVAVFRSDMVLAHRTYTGQVNVPDVLTRLLLSLVATGIAPGSFYRTDTRAHYDGLPVDFTAEAVVALGAPITEGHRTFNVLNPHDDGVSLDTFVDWLIEAGHPIRRIDDHGAWLTRFTAALRALPEKQRQHSLLPLIGAWAEPGEGAPGPLLPARRFHAAVRAAGVGPERDIPRVSPDLIRKYVTDLRALGLLAGP

SEQ ID NO: 158 - protein, 1392 aa, Artificial Sequence
  Saccharomyces cerevisiae S288C
MTNEKVWIEKLDNPTLSVLPHDFLRPQQEPYTKQATYSLQLPQLDVPHDSFSNKYAVALSVWAALIYRVTGDDDIVLYIANNKILRFNIQPTWSFNELYSTINNELNKLNSIEANFSFDELAEKIQSCQDLERTPQLFRLAFLENQDFKLDEFKHHLVDFALNLDTSNNAHVLNLIYNSLLYSNERVTIVADQFTQYLTAALSDPSNCITKISLITASSKDSLPDPTKNLGWCDFVGCIHDIFQDNAEAFPERTCVVETPTLNSDKSRSFTYRDINRTSNIVAHYLIKTGIKRGDVVMIYSSRGVDLMVCVMGVLKAGATFSVIDPAYPPARQTIYLGVAKPRGLIVIRAAGQLDQLVEDYINDELEIVSRINSIAIQENGTIEGGKLDNGEDVLAPYDHYKDTRTGVVVGPDSNPTLSFTSGSEGIPKGVLGRHFSLAYYFNWMSKRFNLTENDKFTMLSGIAHDPIQRDMFTPLFLGAQLYVPTQDDIGTPGRLAEWMSKYGCTVTHLTPAMGQLLTAQATTPFPKLHHAFFVGDILTKRDCLRLQTLAENCRIVNMYGTTETQRAVSYFEVKSKNDDPNFLKKLKDVMPAGKGMLNVQLLVVNRNDRTQICGIGEIGEIYVRAGGLAEGYRGLPELNKEKFVNNWFVEKDHWNYLDKDNGEPWRQFWLGPRDRLYRTGDLGRYLPNGDCECCGRADDQVKIRGFRIELGEIDTHISQHPLVRENITLVRKNADNEPTLITFMVPRFDKPDDLSKFQSDVPKEVETDPIVKGLIGYHLLSKDIRTFLKKRLASYAMPSLIVVMDKLPLNPNGKVDKPKLQFPTPKQLNLVAENTVSETDDSQFTNVEREVRDLWLSILPTKPASVSPDDSFFDLGGHSILATKMIFTLKKKLQVDLPLGTIFKYPTIKAFAAEIDRIKSSGGSSQGEVVENVTANYAEDAKKLVETLPSSYPSREYFVEPNSAEGKTTINVFVTGVTGFLGSYILADLLGRSPKNYSFKVFAHVRAKDEEAAFARLQKAGITYGTWNEKFASNIKVVLGDLSKSQFGLSDEKWMDLANTVDIIIHNGALVHWVYPYAKLRDPNVISTINVMSLAAVGKPKFFDFVSSTSTLDTEYYFNLSDKLVSEGKPGILESDDLMNSASGLTGGYGQSKWAAEYIIRRAGERGLRGCIVRPGYVTGASANGSSNTDDFLLRFLKGSVQLGKIPDIENSVNMVPVDHVARVVVATSLNPPKENELAVAQVTGHPRILFKDYLYTLHDYGYDVEIESYSKWKKSLEASVIDRNEENALYPLLHMVLDNLPESTKAPELDDRNAVASLKKDTAWTGVDWSNGIGVTPEEVGIYIAFLNKVGFLPPPTHNDKLPLPSIELTQAQISLVASGAGARGSSAAA

SEQ ID NO: 159 - protein, 1144 aa, Artificial Sequence
  Cyanobium sp. PCC 7001
MNESSADQSSGNVSEGWPDASVTARALQAHLRYEQIIDAILSGYAERPALAERSYLVRPDPSTGQTVRVHEQAFRSISYRTLQERVHALTMAWRLHPDSPVQAGAFVVLVGFASIDYAVLDLALAYTKGVPVPLSPNHSSEDDDAILGTVQPVTLAVSISEFSGCVDLIARSTSIRTVIVFDLDPAVDCERAALESGIRALNEKGSDVVVQTLQDLIDVGRDAEFSFLPIQAQDQDDLALLIHTSGSTGTPKGACISSRALINTWRHVSGPYPKVTVVLAPFHHMMGRDSMITALGAGGTAYFTLRPDLSTVIEDIRLARPTGLVLFPRLCEVIEHHLTTAPEYSGNEILGGRLQSIVVASAPITPRLKASLECLLGVPVSEGYSSTETASGGLAMNGLLNRNNILAYRLRDVPEAGYSVNDRPFPRGELCVKTRFGISGYFRNPEATAELFDDDGFYCTGDIVEERAPDQIAIIDRRKNVIKLAQGEYVAVGRLEQLFQEGCGCVQQIHLHGDSTRAYLLAVVVPDRNTLAPPGSRQASEAELKARVREEILTLANQRELRGFEIPRDLILAEEPFSQQNGLLSSLGKPIRPAIRARYRSRLESLYASHEATRGTELEAIRASAGAVDVETTLLALLSSTLGVVCGAADRQTSFRELGGDSLAAVQLAMEIKKQFGVGLEGSQILGPGGTVEAWARRIHTASIQQAPHQRVGSPLAAIPAEGWLKPDHYRLENLIGIPIGTPSAEVARPTGGPPTVLLTGATGFLGGRLCLEWLQRLAGQGGRLICLVRPSNSHSAWERLRNRFSHLEPEQVARFRELAGRHLEVIPADIGEPGLGLEPGCQERLATEVDAICHCAAEVNHRLPYRHLYRPNVIGTAEIIHLAITTRLKSVDFISSIGVASLPRRPGGSIPVEGGYARGYFASKWACEQLLRSTHDCTGVPVRVIRPSLILPDRVLAGEMNPDDLLSRLLYSILVTGIAPGCFGEESQNSGRSGFSVQGLPVDQLAQTILALGEARTEGFHVLNLNADSGSGVPLDAILQDIAAKGIRLRRVEGYDLWLDAITTRLRRLPAEQRARSLLDVAEAYAGSAGQTTQSSGEMQAGSSSCPEEITSLQPDFSRAYRRKIVDDLARWGLIEPPGPVDQ

SEQ ID NO: 160 - protein, 1052 aa, Artificial Sequence
  Neurospora crassa
MSQQQNPPYGRRLILDIIKERALNEPNREWVSVPRSSDPKDGWKILTYLDAYNGINRVAHKLTQVCGAAAPGSFPTVAYIGPNDVRYLVFALGAVKAGYKALFISTRNSAEAQVNLFELTNCNVLVFDQSYKATVQPWLHEREMTAILALPADEWFPADQEDFPYNKTFEEAEWDPLMVLHTSGSTGFPKPIVARQGMLAVADQFHNLPPREDGKLMWIVEMSKRAKRLMHPMPLFHAAGMYISMLMIHYWDTPGALGIGERPLSSDLVLDYIEYADVEGMILPPAILEELSRDEKAIQSLQKLNFVSFGGGNLAPEAGDRLVENNVTLCNLISATEFTPFPFYWQYDQKLWRYFNFDTDLFGIDWRLHDGESTYEQVIVRKDKHPGLQGFFYTFPDSSEYSTKDLYKRHPTHEDFWIYQGRADNIIVFSNGEKLNPITIEETLQGHPKVMGAVVVGTNRFQPALIIEPVEHPETEEGRKALLDEIWPTVVRVNKETVAHGQIGRQYMALSTPGKPFLRAGKGTVLRPGTINMYKAEIDKIYEDAEKGVATDEVPKLDLSSSDALIVSIEKLFETSLNAPKLEADTDFFTAGVDSMQVITASRLIRAGLAAAGVNIEASALATRVIYGNPTPKRLADYLLSIVNKDSNQGTLDNEHHVMEALVEKYTRDLPTPKQNKPAPADEGQVVVITGTTGGIGSYLIDICSSSSRVSKIICLNRSEDGKARQTASSSGRGLSTDFSKCEFYHADMSRADLGLGPEVYSRLLSEVDRVIHNQWPVNFNIAVESFEPHIRGCRNLVDFSYKADKNVPIVFVSSIGTVDRWHDEDRIVPEASLDDLSLAAGGYGQSKLVSSLIFDKAAEVSGVPTEVVRVGQVAGPSSEKGYWNKQEWLPSIVASSAYLGVLPDSLGQMTTIDWTPIEAIAKLLLEVSGVIDNVPLDKINGYFHGVNPERTSWSALAPAVQEYYGDRIQKIVPLDEWLEALEKSQEKAEDVTRNPGIKLIDTYRTWSEGYKKGTKFVPLDMTRTKEYSKTMREMHAVTPELMKNWCRQWNF

SEQ ID NO: 161 - protein, 1139 aa, Artificial Sequence
  Streptomyces fradiae
MRLAHVVASVMERHADRPVIGERVKEFARDDETGRTVIRLLPRYETTSYQELWARVRSVASDWHHHPSHALTAGERVALLGFTSRDYTTVDLACIHLGAVAVPLQTSAAPAQLRSIVAETEPAVVAASLERMDAAVDLVRDSPSVRRLVVFDHHPEADDHREAYDAARARLAEARPDVLVEPLTEIVRRGADLPEAPLFAAPEGEDPLAMLIYTSGSTGTPKGAMYTERLAAAMWGGAWAKLFDETYAVTFHYMPMSHVAGHSSLKATMVRGGASYFTASSDLSTFFEDIALARPTELSLVPRVCEMIHQRFRSEVDRRTAAGADPAAAEAEVRADIRDNVLGGRVTWASCASAPLSAELTAFTESLLGLELHNVYGSTEAAGVSVDGVLLRPPVTDYKLADVPELGYFRTDSPHPRGELLLKTDVIIPGYYKQPELTAELFDEDGYYRTGDIVAELEPDRIAIVDRRKNVLKLSQGEFVATSRLEAVFAASPLVRQIFVYGNSERSYLLAVVVPTPDALRAADGDERALRRALGTSLQELARESGLNSYEIPRDLLVETEPFSQANGLLSDHRKLLWPRLVERYGERLEQLYADTAAREDEELREIRRTGADRPVLETVQRAARALLGGSAAAIGPDARFRDLGGDSLSAVSFSALLQETFGVRVPVDVVISPASDLRHLAEYIEGRRGAADRPTFASVHGEGATEVHAKDLTLDAFVDASTLAAARTLPRAHDEPRTVLLTGASGWLGRFLVLQWLERLAPSGGRVVALVRGRDAEAARRRLDAAFDSGDPELRRAYETLAEGRLEVVAGDMAAPGLGLDEAVWERLADEVDLVVHAGALVNHVLPYPELFEANVVGTAELIRLALTRRLKPFTYISSVAVATSLPGGAALDEDSDVRDALPVQPVDGGYAGGYAASKWAGEVLLREAHDLCGLPVTTFRSNMILAHSRYGGQLNVPDMFSRLLFSVLATGIAPRTFYRGDAARAHYDGLPVDFTAAAVVALGGETGRADTYRTFSLVNPNDDGVGLDTFVDWLTEAGHRVERLDDYADWYARFEAAMRALPEAQRRHSALPILHGFREPEEPVPGSVIPSDRFRAAVRAGGVGGYRDIPGLDRPLLAKYAQDLTSLASSAGVVTRA

SEQ ID NO: 162 - protein, 1180 aa, Artificial Sequence
  Mycobacterium liflandii 128FXT
MSITCVDTRAQRSAHRIEQLYSTDAQFAAARPSTTVGIAISKSRLGLRQIIQTVMDGYAQRPALGQRATRVVTDPNTGRSSAQLLAEFETITYRELWNRTNALTNAFAAEALADRGQRVCVLGFASIDYATIDLALTLLGAVSVPLPTNAARAQLCHIVSETQPSLIASSTENLSDAISLVLSHRAPHRVVVFDYRPELDAHREALEAARARLAAIPVTVETLTAIIARGRTVRPAEAYCGTQSADAPALLIYTSGSTGAPKGVVYTRKRVADFWRTSKAEVEPTEQRTAPSITLNFMPMSHANGRQVLYGTLSNGGTAYFTARSDLSTLFDDLALVRPTQLGFPPRIWDMLLERFGREVDRRLRDGTAEGADPGALKARVAADLRQVLLGGRYALAMMGSAPISEQMKASVESLLDLDVMEGYGSTEAGTVIINNEVQRPQVIDYKLVDVAELGYFLTDRPYPRGELLVKTRTLFSGYYRDPEDGAQVFDPDGFYRTGDIMAQVGPDRLAYLDRRNNVLNLSQGEFVAVSRLEAIFANSPLVRQIFVYANGARAYPLAVVVPTEDAQSRHGRAELKAELHTSLHRVAMSAGLEPYEIPRDFIVETTPFTPQNGLLTAIHKLARPHLTQRYGARLELLYTELADSQTCRLHRLRQTGGRLPALETIRRAAGALLGTATTEPRPEAHFKDLGGDSVSAVTFSNLLHDIYGFDVPVGVILGPATDLRALASHVESRRGAGWSGPSFASVHAPRATSVHAGDLKLAKFLDTKTLAAATSLPAAEARARTVLLTGATGFLGRYLVLEWLRRLRAVGGKLICLVRAASDEQARVRLDTAFDSGDPRLLGHFRQLAVDRLEVIAGDKSEPGLGLDGRTWQRLADTVDLIVDPATLVNHVLSYRQLFAPNVAGTAELLRLALTTKRKPYAYVSTVSVANQIEPSAFTEDADIREISRTRTIDDSYANGYTTSKWASEVLLREAHDLCGLPVTVFRCDMILADTSYAGQLNLADTFTRLMLSVAATGIAPASFYRLGPDGKRQPAHFDGLPVEFIGEAVTTLGARRHDGFQVHHVANPHHDGVGLDEYVDWLVDAGCPIRRIPDYDEWLSRFETALHALPDRKRRHSLLPLLQNYREPAEPIRGGIAPAPRFRGAVRQAKIGRDNDIPHVGPAIIAKYASDLQLLGLA

SEQ ID NO: 163 - protein, 1187 aa, Artificial Sequence
  Mycobacteroides abscessus
MTVTNETNPQQEQLSRRIESLRESDPQFRAAQPDPAVAEQVLRPGLHLSEAIAALMTGCAERPALGERARELVIDQDGRTTLRLLPRFDTTTYGELWSRTTSVAAAWHHDATHPVKAGDLVATLGFTSIDYTVLDLAIMILGGVAVPLQTSAPASQWTTILAEAEPNTLAVSIELICAAMESVRATPSIKQVVVFDYTPEVDDQREAFEAASTQLAGTGIALETLDAVIARGAALPAAPLYAPSAGDDPLALLIYTSGSTGAPKGAMHSENIVRRWWIREDVMAGTENLPMIGLNFMPMSHIMGRGTLTSTLSTGGTGYFAASSDMSTLFEDMELIRPTALALVPRVCDMVFQRFQTEVDRRLASGDTASAEAVAAEVKADIRDNLFGGRVSAVMVGSAPLSEELGEFIESCFELNLTDGYGSTEAGMVFRDGIVQRPPVIDYKLVDVPELGYFSTDKPHPRGELLLKTDGMFLGYYKRPEVTASVFDADGFYMTGDIVAELAHDNIEIIDRRNNVLKLSQGEFVAVATLEAEYANSPVVHQIYVYGSSERSYLLAVVVPTPEAVAAAKGDAAALKTTIADSLQDIAKEIQLQSYEVPRDFIIEPQPFTQGNGLLTGIAKLARPNLKAHYGPRLEQMYAEIAEQQAAELRALHGVDPDKPALETVLKAAQALLGVSSAELAADAHFTDLGGDSLSALSFSDLLRDIFAVEVPVGVIVSAANDLGGVAKFVDEQRHSGGTRPTAETVHGAGHTEIRAADLTLDKFIDEATLHAAPSLPKAAGIPHTVLLTGSNGYLGHYLALEWLERLDKTDGKLIVIIRGKNAEAAYGRLEEAFDTGDTQLLAHFRSLADKHLEVLAGDIGDPNLGLDADTWQRLADTVDVIVHPAALVNHVLPYSQLFGPNVVGTAEIIKLAITTKIKPVTYLSTVAVAAYVDPTTFDEESDIRLISAVRPVDELYANGYGNSKWAGEVLLREAHDLCGLPVAVFRSDMILAHSRYTGQLNVPDQFTRLILSLIATGIAPGSFYQAQTTGERPLAHYDGLPGDFTAEAITTLGTQVPEGSEGFVTYDCVNPHADGISLDNFVDWLIEAGYPIARIDNYTEWFTRFDTAIRGLPEKQKQHSLLPLLHAFEQPSAAENHGVVPAKRFQHAVQAAGIGPVGQDGTTDIPHLSRRLIVKYAKDLEQLGLL

SEQ ID NO: 164 - protein, 1167 aa, Artificial Sequence
  Mycolicibacterium vaccae ATCC 25954
MFVVPDDGHPPPSLPIDRKSVMPTSDHDQWLRRFEQLTSSDAQLVAAQPDPAVTDAISSPDARLVDVMRTVMTGYADRPALGQRAVEFVTDVTGRTVAELQPRFETLTYGETWARVRALAHALINDPVRPGDRIATLGFTSADYAVVDMAVSLTGAVGVPLQTSAALAQLQPIVVESAPAVILSSVGDLADAVELALSAHAPERVIVFDYHPQLDEHRDAFAAAADRLHDIPLESLDDVIARGAEHLAESEPDAGAPDDLRMLVYTSGSTGAPKGAMYTDRLMANCWRGWFSPERNVDGRLPAITLDFMPLSHVMGRVVLYGTLGAGGTAYFTARSDLSTLLDDLALVRPTRLDFVPRIWEMLFQEVQNSGGQGKDLLGGRQLFAMTGSAPTSPELRQWAEDYTGIHIIDGYGSTEAGIALVDGEIQRPAVLDYKLVDVPDLGYFTTDRPHPRGELFLKTTNLIPGYYKRPDVTAELFDADGWYHTGDVMAEVGPDRLEYVDRRNNVLKLAQGEFVTVSTLEAAYGGHPSIRQIFVYGNSSRSYVLAVIVPTDDVLAGVGGDVTAVKPVLAEALQAVARGAGLQSFEIPRDFLVETQPFTLENGLLTGIRKLARPQLKQRYGPALEQLYTDLAEGQADVLRELRRTGADGPALQTVTHAAEALLGTTGAAPDTAFTDLGGDSLSALTFGNLLHDIFDVDVPVGVIVSPASDLAAIAAYVEAQRAGGATRPSYDAVHGPAATEVHAKDLTLDRFLDEATLAHAAALPGPSGEVRTVLLTGATGFLGRYLALHWLEQMSLVGGTVIALIRAKDDAAARARLDATFSSDPRLLAHYRELAAEHLEVLAGDKGEADLGLTRATWQRLADTVDLIVDPAALVNHVLPYRQLFGPNVVGTAELIRLALTTRIKPFVYVSTIGVGDGIAPGRFVEDADIRQISATRTIGDNYANGYGNSKWAGEVLLREAHDLAGLPVSVFRCDMIMADTTYAGQLNVPDMFTRLMLSLAVTGIAPNSFYELDEGGSRQRAHFDGLPVEFIADAISTIGAQVIEGFETYHVMNPHDDAISLDTFVDWLIAAGYPIVRVPGYAAWLQRFDTALRGLPEKQRQASLLPLIHNYQHPEHPINGPLAPADRFRAAVQEAKIGPDKDIPHLSAPVIVKYLTDLELLGLI

SEQ ID NO: 165 - protein, 1325 aa, Artificial Sequence
  Sorangium cellulosum
MDPSSDTRDPQESEITQNDDSNELLLTRSLERCARLVQTDEELRRALPSPAALEKIRRCHTTIECVATAFELYADRPCLGHRPLDAAATAADGGSAPRYLPEFRAVSYADVWSRVEAFASGLQHEKLANTGDFVGISGFGSTDWVVAGLACMYLSAVSVPLQTDLTPADLELIVTEAELACVVCSVGQLARIEDILPRCPSVRSVVVMDLLEGDRCGQSELERARRALRPLEARGRRLAVRAMHEVERLGRQQGIAPKVLPAQRGEPDPLMTLMYTSGSTGSPKGAMVPESLWRRYWQIAFTRSQDPRLDLLPHVGLNYSPMNHFIGRSQVGRSLMRGGITHFVLKSDMSTLFEDIRLARPTTLFLVPRIAELIHQQFQADVLRRARGLGAGGDDAARRRIEREIMAEMRGSLLGDRLLLASIGSAPTPPEVLSFLKRCFDVPVFEGYGSTEASSLTTDGRLDRELVTEFKLVDVPELGYSATDQPYPRGELHIRSSLMVPGYYKNEKATRALFDEEGLMNTGDIVEQRGPDTVVWIDRARNVLKLSQGEFVATSRLEVLYSAGSPFIQQIFLYGNSTRSYLLAVVVPEMREISAHLRQRDVKPDGEPVRQLLRAEIDRIARENQLRGYEIPRDFLIEPAPFTRASGLLTETQKPARARLKARYGARLEELYATIERTQLQELRNLREGGGAAPASAALVVKKALEATLGITGVEPRSARSFAQLGGDSLSAVRLSRLIEEISGVAVPVGLVLNPTSSVRAIADHLEHALAGEAPRRAARFDEVHGAGAEVVRAADLRLDRFLGPDELAAARRATPAAALPAQARVALLTGANGFLGRFLALELLERLPEEGRLYCVVRSPDDALAFDRLRATYESDPALLERFDALSAHGRLVVLAGDLVEPRFGLADDLYAHLCVEVDCVVHNGALVNHALSYPQLFEPNVLGTVEAIRLSLAHRVKSMNYISTIAAVGGLDRSGPIREDEDIRELWPERALGAGYAVGYATSKWASEVLLQDAHDALGLPVNVYRPSGIMAHSLYRSQINVPDFFTRLLCGVVYTGLAPRSFYEGGRPHRDGHYDGLPVDAVARSIARRRRSTAPHGGRRRSTAPHGRGGGEGEPRDLSCREPLLGRRHLARRHRLVGPIGGLPGGARRRLRRVVRGVPRPADAAERAAQAPLAAAHPQRVGAPGARRRRGVRRGAPPRPAAAARGARRGGRSRDPAARRRAAHSQVPGRHGRAGAHRARRRARRVLTRALAPRALDPARARYRSPPAMCANSTSGAIGLTRCASHPASLDRRTSSCWPYPVNARIRRAPAPASPRILRATS

SEQ ID NO: 166 - protein, 1215 aa, Artificial Sequence
  Mycobacteroides abscessus subsp. massiliense
MASTSSQGIVSLGMYFYRVGSGAPVLVTNTDSSEVSGMTETISTAAVPTTDLEEQVKRRIDQIVSNDPQLAALLPEDSVTEAVNEPDLPLVEVVRRLLEGYGDRPALGQRAFEFVTGDDGATVIALKPEYTTVSYRELWERAEAIAAAWHEQGIRDGDFVAQLGFTSTDFASLDVAGLRLGTVSVPLQTGASLQQRNAILEETRPAVFAASIEYLDAAVDSVLATPSVRLLSVFDYHAEVDSQREALEAVRARLESAGRTIVVEALAEALTRGRDLPAAPLPSADPDALRLLIYTSGSTGTPKGAMYPQWLVANLWQKKWLTDDVIPSIGVNFMPMSHLAGRLTLMGTLSGGGTAYYIASSDLSTFFEDIALIRPSEVLFVPRVVEMVFQRFQAELDRSLAPGESNSEIAERIKVRIREEDFGGRVLSAGSGSAPLSPEMTEFMESLLQVPLRDGYGSTEAGGVWRDGVLQRPPVTDYKLVDVPELGYFTTDSPHPRGELRLKSETMFPGYYKRPETTADVFDDEGYYKTGDVVAELGPDHLKYLDRVKNVLKLAQGEFVAVSKLEAAYTGSPLVRQIFVYGNSERSFLLAVVVPTPEVLERYADSPDALKPLIQDSLQQVAKDAELQSYEIPRDFIVETVPFTVESGLLSDARKLLRPKLKDHYGERLEALYAELAESQNERLRQLAREAATRPVLETVTDAAAALLGASSSDLAPDVRFIDLGGDSLSALSYSELLRDIFEVDVPVGVINSVANDLAAIARHIEAQRTGTATQPTFASVHGKDATVITAGELTLDKFLDESLLKAAKDIQPVTADVKTVLVTGGNGWLGRWLVLDWLERLAPNGGKVYALIRGADAEAARARLDAAYESGDPKLSAHYRQLAQQSLEVIAGDFGDQDLGLSQEVWQKLAKDVDLIVHSGALVNHVLPYSQLFGPNVAGTAEIIKLAISERLKPVTYLSTVGIADQIPVTEFEEDSDVRVMSAERQINDGYANGYGNSKWAGEVLLREAHDLAGLPVRVFRSDMILAHSDYHGQLNVTDVFTRSIQSLLLTGVAPASFYELDADGNRQRAHYDGVPGDFTAASITAIGGVNVIDGYRSFDVFNPHHDGVSMDTFVDWLIDAGYKITRIDDYDQWLARFELALKGLPEQQRQQSVLPLLKMYEKPQPAIDGSALPTAEFSRAVHEAKVGDGGEIPHVTKELILKYASDIQLLGLV

SEQ ID NO: 167 - protein, 1088 aa, Artificial Sequence
  Curtobacterium sp. MCSS17_007
MADVFARFGDRPAVGERAREYVRDDRTGRVSARLLPRFETITYRELWGRVGAVAAEWHHHPEHPLAAGDRVALLGFTSRDYATLKLTCGYLGAVSVPLQTSASPANLAAILSETEPVLLATAIDRLDVAAELARGSSSIRRVVVFDYDPRDDDQADRFAAARDVGAVALSDLLDLGATLPEAPPYVPGDDEDPLAMLVYTSGSSGTPKGAMYPEWLARVMWEDRARRTPDGGLSTVHYMPLSHIGGHFTLMNTLARGGLSCFTAAADLSTLFEDLALVRPTEVSLVPRVCEMLHQRYRGEPDERARAEALGGRVTFATCGSAPLSAALTDFMETLLGVPLYDMYGSTEVAGIAVNGILMNPPVLDYRLVDVPELGYFGTDVPHPRGELLLRATGVPGYYRHPELTAELFDADGYYRTGDIVAELGPRRIAFVDRRTSVLKLSQGEFVATSRVESVLGAGPLVRQIFVYGDSGRSHLLAVVVPTPEALAAHGDDPARLDQLLGESLRRVARDAGLNSYEIPRGQLIETEPFSHRNGLLSDNRKLLRPRLVERYRAELDQLYDRIAARAEQELLDLRRTGGDRPALETVQRAVRALLGGTAAEMRPDTCFRDLGGDSLSAVTLANLLYDIFAVPVPVDVVLRPGHDLRQLAGFIESKRDGTTGRPTFGSVHGAGAAQAYARDLTLDRFLDAGIRETAARLPGPVGAPRCVLLTGAAGYLGRFLALEWLRRLAPDGGRLIAVVRGRDAEAAGQRLADAFAGADPEPEAAKHLEVVAGDLAEPRLGLDETTWARLASEVDLIVHAGALVNHVLPYPHLFEANVAGTAEVIRLALTTRMKPVTYVSSVAVAAAPLAAGTGPPLDEDADVRVALPVQPVDGGYASGYATSKWAGEVLLREAHDRFALPVTVFRASMLLAHRRYAGQLNAGDLFSRLVFSVLATGMAPESFYQPGRAHYDGLPVDFTAAAIVGLGSGAPGFRTRHVVNPHDDGISLDTVVTWLIEDGRRIERIPEHADWLARVEAALRALPETHRQHSVLPLLHAFREPEPAVPGSALPSERFRAVAGEIPHLTSDLIRRYATDLHDRTGGPWTR

SEQ ID NO: 168 - protein, 1165 aa, Artificial Sequence
  Nocardia brasiliensis ATCC 700358
MTDVEVARRINDLSATDEVLAGALPDPAVDARIQDPAVGLAELIRIVFAAYGDRPAVGARATRLVTDPVTGRTTLHVLPEYETTTYAELGQQVAAVAAGLRGDAADGGWVRLGEHVAMLGFTSVEYTVLDLAATLAGAVAVPMQSNAPAAQLRPILAETQPRVLAAGVDQLAEALDLADGEHRPGLIVVLDHRPEVDAHREAFDEAAARLSGTGVALKTLAELADSGKDGVVAPEPADSERIVLLIYTSGSTGTPKGAMYSERLVANLWQGKFGLAEGPHAAGPWITLNFMPMSHLMGRYTLYGTLARGGIAYFAASSDLSTFLEDLSLVRPTQLQFVPRVWDLLYQEYQRALDGVDPAERSGRTPELLAEMRRDLLGGRVLGAVTGSAPISVEVREFVDALLGFHLPDGYGSTEAGGITVDGKVVRPPVLDYKLADVPELGYYSTDRPHPRGELLVKTQNIFPGYYRRPEVTAEVFDPDGYYRTGDIVAEVQPDELHYLDRRNNVLKLSQGEFVTVSKLEAAFGASPLIQQIYIYGNSSRPYLLAVIVPDDAVLERVSGDVGAVGPLLTEALRAVAADAGLQSYEIPRDFLVETSPFTVENGLLTGIRKLARPKLRQRYGELLEQLYQRLSDGQAEELRALRVGAADRPVLETVSRVAAALLGIAAADVHPAAHFTELGGDSLSALTFGNALHDILGVEVPVGVIVSPATDLRALATFLESGAQTSRPTFATVHGPDATEVRAADLTLEKFLDAATLDGAAALPAPNYAVRTVLLTGATGFLGRFLALALLERLGPVDGTLICLVRATDDTAARQRLDEVFDSGDPQLLTHYRRLAERHLEVVAGDKGELDLGLDRGTWQQLAERVDLIVDCAALVNHVLPYSQLFGPNVVGTAELIRLALTGKQKIFDYISTVGVGDQIAAGQFVEDADIRTISATRSVDERYANGYGNSKWAGEVLLREANERYGLPVSVFRCDMIMVDGSYVGQLNVPDMFTRLMLSLVATGVAPGSFYQTDAAGQRQRAHYDGLPVDFIAEAVTELGVHEGFSTYHVMNPHHDGIGLDEFVDWLVAAGYPITRVADYQTWLEQFGTKLRALPEQQRRHSLLPLLHSYAHPQPPVEGSVAPADRFRAAVQDANIGPDKDIPHLTESTILKYITNLEHLGLL

SEQ ID NO: 169 - protein, 1064 aa, Artificial Sequence
  Allokutzneria albata
MTTATGPRPDITAAITRPGVRVQEILRTVLDGYSDRPALGERETVLRTDPVTGRRTRELLPGFRTISYGELRARIEAVAADLRLQSGDVVGLLGFTSLDHTTVDLACVHLGAVCVPLQSSASAAQLKPVIAEIEPRLLATSLQLLDTAVEVALSSTSVQWIVVFDYHEDDDDEREIFLAAQERFAVESLTDVLERGAALPAPPAHVPRPDEDPLSLLVYTSGSTGTPKGAMYTERLLRRLWLGYLPPIPDLSVIRVHYMPMSHLTGRAAVIETLVAGGIGYFTARSDLSTLFEDIALARPTELFLIPRLSDMLFQRYQRELDRGVPEAEAMAVIREAVLGGRVERSATGSAPLSAELAAFVQNCLGVRLHDGYGSTETGRVFVDGKVTRPPVIDYKVVDVPELGYFRTDAPHPRGELLVRTEAMISGYYKRPDLNAEVFDEDGFYRTGDIVAEPGPDQLVYLDRRKNVLKLSQGEFVAVSRVEAALGASPLVRQIFVYGNSERAYLLAVVVPTGAHRKERISESFHHIAREAGLSSYEIPREFIVETEPFSTANGLLSDLNKPLRPALRERYGPRLEQLYVELAEREADELRALRAAGADQPVLPAIRSAARALLGSADADARFTDLGGDSLSALSMANLLRDIFDVDVPVSLIISPATTLRGLADHIERAPRAARGPKTSVRAADLTLDKFVRPTPNTIGTVLLTGANGYLGRFVCLEWLQRLAATGGKLICLVRGGSTRLEEAFGDSALLRRFRELSGHVEVVSGDLSEPDLGLPRRTWDRLAETVDLIVHPAALVNHVLPYEELFGPNVVGVAELIKLAITKRRKGFTFLSSIAVAEGEDTDVRRASPVRALDGSYANGYATSKWAGEVLLREAHERYRLPVVVLRSDMILAHSTCTGQLNVPDMFTRLLFSLIATGIAPRSFYRSDAEHYDGLPVDFVARVVADLGAPSEGYRTFNVVNPHEDGISLDTFVDWLIEAGHRIHRIDDHAEWSRRFEMALRALPEKQRKHSMLPLLHAVAAPVEPGPLVPSERFQAAVGEIPQVSRELIVKYADDLRSLGLL

SEQ ID NO: 170 - protein, 1164 aa, Artificial Sequence
  Mycolicibacterium vanbaalenii PYR-1
MERKAEVLAARRVEDLIERDAQVRAAIPDPVVTAELERADGSLAQTVARVMAGYADRPALGQRAVEFVPDENGCRRTRLLPWFDTITFGELWQRVGTVAAVWQSRAERSVRAGDFVAVLGSTGIDYTVVDLACTYSGAVPVPLQAGASPTQLAPIVREVEPKVLATDVGQLEVAVDLASAGDSVRSLLIFGLYAEDDEHCAAVESARRRLADTPVVVETIVELLASGQDRPAASLHASADPDELALLIYTSGSTGTPKGAMYTQRLLTNAWCAAGASPMPSIALSYLPMSHTMARQLLLTGLARGGTVYFAARNDMSTLFDDFALARPTLLGFVPRVCDMVLQRFQSEMARRVGADDEPTVVEQEVKTELREQFLGGRFLVASIGSAPLSADMREFMQSVLGIALIDAYGSTETGGVLMNNKVVRTAILDYKLVDVPELGYFSTDRPHPRGELLIKSRTLIPGYYKRPELNSQFFDAEGFYRTGDVMAQTGFDELVYVDRRNSVLKLSQGEFVAVSKLEAIFVGSPLVEQIYVYGSSERAYLLAVIVPVAEAIATHAGTAELKAAISESLRQIAKDAELSSYEVPRDFLLESEPFTVDNGLLAGLSKLLRPSLKERYGERLEALYRVAEAAQTQELAALRQQAGMLPVLETVSRAAQAVLGVSAAELRPDAHFTDLGGDSLAALSFSTLLQELLGVQVPVGVIASSANDLRRIANYAVAERSAGSLRPTSTGVHGTGSQLRAIDLRLDKFIDPSTLAAATTLPRAGEPRTVLLTGANGYLGRFLCLEWLQRLHHSGGTLICVVRGIDAVAARERLDEVFDSGDPELLHRYRELAEGTLEVLCGDISEPGLGLSERDWRRLADTVELIVHAAALVNHVLPYGQLFGPNVVGTAEIIRLAMTTRIKPVTYLSTVAVAAQVAPEQFTEDGDIREISAVRSLDEGYADGYGTSKWAGEVLLREAYDLCGLPVAVFRSDMILAHSRFAGQLNVSDMFTRLVLSVLATGVAPKSFYETDRMGNRQRAHYDGLPVDFTAQAITVLGSQVVSGFETFDVLNPHDDGLSLDEFVDWLIAAGHSIDRIDGYAEWLSRFGTALRVLSERQRQHSVLPLLHAYRRAAVPIPGAALPAKKFQAAVQDAQLGPGRDIPHLTPDLIEKYVSDLKLRNLL

SEQ ID NO: 171 - protein, 1166 aa, Artificial Sequence
  Nocardia vulneris
MATDSRSDRLRRRIAQLFAEDEQVKAAVPDPEVVEAIRAPGLRLAQIMATVMERYADRPAVGQRASEPVTESGRTTFRLLPEFETLTYRELWARVRAVAAAWHGDPERPLRAGDFVALLGFTSIDYGTLDLANIHLGLVTVPLQSGAAAPQLAAILAETTPRVLAATPDHLDVAVELLTGGASPERLVVFDYRPADDDHRAALESARRRLSDAGSAVVVETLDAVRARGGELPAAPLFVPAADEDPLALLIYTSGSTGTPKGAMYTEGLNRTTWLNGAKGVGLTLCYMPMSHVAGRATFSGVLARGGTAYFTARSDMSTLFEDLALVRPTEMFFVPRVCDMIFQRYQAELSRRAPAADASPELEQELKTELRLSAVGDRLLGAIAGSAPLSAEMREFMESLLDLELHDGYGSTEAGIGVLQDNVVQRPPVIDYKLVDVPELGYFRTDQPHPRGELLLKTEGMIPGYYRRPEVTAEIFDEDGFYKTGDIVAELEPDRLIYLDRRNNVLKLAQGEFVTVAHLEAVFATSPLIRQIYIYGNSERSFLLAVIVPTADALAGGVTDALNTALTESLQQLAKEAGLQSYELPREFLVETEPFTVANGLLSGIAKLLRPKLKEHYGERLEQLYRDMEANRNDELIELRRTAAELPVLETVTRAARSMLGLAASELRPDAHFTDLGGDSLSALSFSTLLQDMLDVEVPVGVIVSPANSLADLAKYIEAERHSGARRPSLVSVHGPGTEVRAADLTLDKFIDERTLAAAKAVPAAPAQAQTVLLTGANGYLGRFLCLEWLQRLDKTGGTLICIVRGTDAAAARKRLDAVFDSGDPELLDRYRKLAADHLEVLAGDIGDPNLGLDEATWQRLAATVDLIVHPAALVNHVLPYSQLFGPNVVGTAEIIRLAITERRKPVTYLSTVAVAAQVDPAVFDEERDIREMSAVRTIDAGYANGYGNSKWAGEVLLREAHDLCGLPVAVFRSDMILAHSTYVGQLNVPDVFTRLILSLVLTGIAPYSFYGTDSDGQRRRAHYDGLPADFVAESITTLGARADSGFHTYDVWNPYDDGISLDEFVDWLSDFGVPMQRIDDYDEWFRRFETAIRALPEKQRDASLLPLLDAHRRPLRAVRGSLLPAKNFQAAVQSARIGPDQDIPHLSPQLIDKYVTDLRHLGLI

SEQ ID NO: 172 - protein, 1175 aa, Artificial Sequence
  Mycolicibacterium confluentis
MSVDTQDDQLARRIADLVGDDAQFAAARPDDAVTAAINEPSLRLAQIMDTLAEGYADRPALGARAVEFVEDPATGRTTTTLLPRFETITYRELWARLRSVAAALADGAVSPGDRVGVLGFTSIDYAVIDMATVLLGAVCVPLQTSAPLTQLQPIVDETEPTLIAASVDHLGDAIGLSGNSESPARLIVFDLHPEVDDHRDAVADAQRRLADGEHAVTVEALADVIARGESKVTGPVPVVGEGDPLSLLIYTSGSTGRPKGAMYPESLVTNAWRRSTNMVGAQGTTGPSITLSFMPMSHVMGRHILFETLASGGTSYFAATSDLSTFLEDLALVRPTLLSFVPRIWEMIFTEHQSALNRRVNAGEDEATASEAVSADLRDNLLGGRYVAALTGSAPISAEMTAFVESLLGLHLVEGYGSTEAGMVFIDGAVRRPPVIDYKLVDVPDLGYFHTDRPNPRGELLVKSDTMFPGYFNRPDATADVFDEDGYYRTGDVVAETGPDQLVYLDRRNNVLKLSQGEFVTVSKVEAVFADSPVIGQIYIYGNSARAFLLAVIVPTDDALAQVDSDVDAVKPILGESLQRAAKAAGLQSYEIPRDFIVETTPFTLENGLLTGIRKLARPRLKEKYGEALEQHYADLADGQTNELAALRRDGDTAPVLESVSRAAAALLSASASDVQADAHFTDLGGDSLSAVTFANLLREIFDIDVPVGVIVNPAADLQAIADYIDNERNSGATRPTFATVHGADATAVHARDLTLDKFVDAETLAAAPSLPRPGEQVRTVLLTGATGFLGRFLALEWLERMDLVDGTLICIVRAKDDAAARARLDATFDSGDPALLARYEKLAADHLEVVAGDKSEADLGLDAQTWQRIADTVDLIVDPAALVNHVLPYAQLFGPNALGTAELIRIALTSKLKQFAYVSTIGVGAGIEPASAFVEDADIREISATRAVDETYANGYGTSKWAGEVLLWEAHDLCGLPVSVFRCDMILADTQFVGQLNVPDMFTRLMLSLVATGVAPKSFYELDSDGNRQRAHYDGLPVDFIAEAISTLSVQLLDGFETYHVMNPYDDGIGQDQFVDWLVDAGYSIQRVDHYDTWLQRFETAVRALPAKQRSASLLPLLHNYQQPVPPLNGAMASTDRFRAAVQDAKIGPDKDIPHITPQIIVKYATNLEVLGLL

SEQ ID NO: 173 - protein, 1170 aa, Artificial Sequence
  Mycolicibacter arupensis
MATAAQPEWMARRISELYATDPQFAAARPSDVVRAQIDHPGLRLPELVRTVCEGYAERPALGQRDYRLVTDPSTGRTSAQAQPGMTTISYREMAKRVDAVAGGLAGDPVQPGDLVAVLGFTSVDYTIVDLAVVQLGAVAVPVQYTTAAAGLQHIIAETEPTVLAVSVEDLPKAVEVAATASALRRLVVFDYLAQIDDHRDAIAAARQRLTQAGSAAVVETLAQVMDRGKDRPTPRVDAPADNPMVAVLYTSGSTGAPKGVMCSEQLVTLAWRGIAPAGLRHDLPSITLNFRPMSHVVGRSMLYGTLGAGGTAYFVSSRDFSTFLDDLALVRPTQLNFVPRVWDMLSEEFGRAVSQRVTDEAERAAVQEQVMAQQRRDLLGARYVVASTGSAPISAELKAWVEAFTAIHLTETYGSTESVLLMVDGRVQCPPVTDYKLVDVPELGYFRTDRPHPRGEFAVKSSSQFSGYYKRPDKTAEAFDADGYYLTGDILAEVAPGEFTFVDRRNDVLKLSQGEFVTVSKVEGVFADSPLIHQIYVYGNSARSYLVAVVVPTEEALAAHDERTLESLIRQSLQDTVKRAGLQSYEVPRDFLIESEPFTAQNGLLTAVGKPARPKLKEHYGERLERLYDDVSARQARELQALREGASDRSVQETVIRAAAALLGVSAAELSAEARFADLGGDSLSALTLSNLLHEIVKVEVPVGVIVGPTSDLRTIAGYVEAQRESGAQHASYAGVHGPDATELHAADLALDKFLDADTLAAAPTLPRPAEQVRTVLLTGATGFLGRYLVLQWLERLAPIGGTLICLVRAGDAAEGRARLDQVFDSGDAGLLAHYQRLAAEHLEVIAADKGEPGLGVDAMTWQRLADTVDLIIDPAALVNHMLPYRQLFVPNVRGTAELLRVAITGRLKPYVYLSTVAVGDQIPPAMFTEDADIRAISPSRQLGEGHANGYANSKWASEVLLRQANDLCGLPITVFRCDMILADTTYAGQLNLPDNFTRLILSLALTGIVPGSFYERGPDGERQRAHYDGLPVGFVADAVSTLGEKYDAGHRTFHVANPYDDGIGLDEFADWLIAADPAIRRIDDYAIWLQRFETALRALPDRLRQHSLLPLLGNYRRPRTPIAGSLVPATRFRAAVQAAKIGPDQDIPHISAPIIGKYLSDLRLLGLLG

SEQ ID NO: 174 - protein, 1173 aa, Artificial Sequence
  Mycobacterium simiae
MQTTKSKYQAARLDLAEHIKALVTQDAQLQGAMPLSPISDAKVNPALGLAQTVALCMEGYSDRPALAQRGIDHVSDPVTGRVSRRLLQHFTTLSYGELWGRAKALASLWQHDDARQLRANDFLCIIAFAGSDFVTVDLAAIHNGAVVAPLQTNAPLGQLTEIVKEVQPRWLATSLECLPITVKLVLLGHRPTGVLLFDYDEHVDDHREALAAARAELSAAGLPDLLLTLEAACALGAKLPIPQLFSEKATDSRLSTLYYTSGSTGLPKGAMYPESMLKPNWRVVAPIPVIYMHYMPMNHSFGRSGVFSTLSNGGTCYFTAKSDLSELFNDIQSVRPTVMAVVPRICEMVYQQYQTQLERRSAGNSETEALRQQLIDEIRNGLLGGRLLSGSFGSAPLAPELREFMEACLGFGMDEFYGATEISGISRNNRLLRPPIIDYKLIDVPELGYFTTDKPHPRGELLVKTHAIMLGYYKRPEVTASAFDEDGYYKTGDIMAETATDVLVYLDRRNNVIKLSQGEFVAIARLEALFTNGHPLIRQAYLYGTSDRSFLLGVLVPNDESVRDMGITDEAALKAALREAVKQVAREEQLNAYEVPRDFLLEHTPFSVENGLLTGIGKYQRPKFKERYAARLEQLYDDIATHQADELQTLRREGCSAPIVETVARAIEATLGIEVLDPYTQASFTELGGDSLSALSCSVLLEDIYQIEVPASVINHPTGNLQQVVQYIERAQDKTIRRPTFSSVHGRSATEIRASDLNLDNFLNAGALEEAADATPPASEPRTVLVTGANGYLGHFLCLEWLERMAAVGGRVICIARGRDTDSARQRIAEAFESGDAQLKQYFETLANKHLDVLPGDLGEPELGLSATDWNALTETVDLIVHPAAFVNHVLPYSQLFGPNVAGTAELIRLALSARLKPIHYVSTVAAAAIVGGVIDEEADVREASPVRPLDAERYADGYANSKWAGEVLLRDAHERFGLPVAVFRSDMILAHSYYQGQVNASDMFTRWLSSVVRTGLAPRSFYAQGAGEPHYDGLPVDFTAKAIAVLGAEARDGYQTYHVINPHEDGISMDTFVDWAISAGHPIQRIDQYDDWFARFETALRGLPEKQRQQSFLPLLHQLRQPMPRTAGAWVSATRFQRDVRKFGVGPDRDIPHLSAAFIGKCLADIKHLGLM

SEQ ID NO: 175 - protein, 1148 aa, Artificial Sequence
  Streptomyces sp. TSRI0395
MAEPLDAAAVPAHDPGQGLAEVLASVEPGRALAEVMASVLESHGDRPALGERARDPETGRLLPHFDTISYRELWSRVRALAGRWHHDPAYPLGPGDRICTLGFTSTDYATLDLACIHLGAVPVPLQSNAALPRLAPIVEESGPTVLAASVDRLDTAVDVVLASRTIRRLLVFDDGPGTTRPSGALAAARERLAGSPVTVDTLAELIDRGRDLPPPPLHTPDPGEDPLALLIYTSGSTGAPKGAMYTQRLLGTAWYGFSYGAADTPAISVLYLPQSHLAGRYAVMGSLVKGGTGYFTAADDLSTLFEDIALVRPTELTMVPRLCDMLLQHYRSELERRSDEPGDIEAAVRKAVREDFLGGRVAKAFVGTAPLSAELTAFVESVLGFHLYTGYGSTEAGGVLLDTVVQRPPVTDYKLVDVPELGYYATDLPHPRGELLLKSHTLIPGYYRRPDLTATIFDADGYYRTGDVFAETGPDRLVYVDRTKDTLKLSQGEFVAVSRLETVLLDSPLVQHLYLYGNSERAYLLAVVVPTPAALAGSGGDTEALRPLLMESLRSVARRAGLNAYEIPRGILVEPEPFSAGNGLFTESHKLLRPRLKERYGPVLELLYDQLADGQDRRLRELRRTGADRPVPETVVRAAQALLGCLSSDLRPGAHFTDLGGDSLSAVSFSELLKEIFHVDVPVGVIIGPAADLAEVARYITAARRPTGIRRPTFASVHGEHLTEVRAGDLVPEKFLDAPTLAAAPGLPRPDGDVRTVLLTGATGYLGRFLCLEWLERLAPSGGRLICLVRGSDATVATRRLEAAFDSGDAALLRRYRKAAAKTLEVVAGDIGEPLLGLAEDTWRELAGTVDLIVHPAALVNHLLPYGELFGPNVVGTAEVIRLALTARLKPVNHVSTVAVCLGTPAETADENADIRATVPVRTIGQGYADGYATSKWAGEVLLREAHERYGLPVAVFRSDMVLAHRTYAGQVNVPDVLTRLLLSLVNTGIAPGSFYRTDTRAHYDGLPVDFTAEAVVALGARVTEGHRTFNVLNPHDDGVCLDTFVDWLIEAGHPIRRIDDHGAWLTRFTAALRALPEKHRQHSLLPLIGAWAEPDEGAPGPLLPAERFHAAVRAAGVGPERDIPRVSPDLIRKYVTDLRALGLLVDP

SEQ ID NO: 176 - protein, 1172 aa, Artificial Sequence
  Nocardia seriolae
MVEDVRGELQRIADRLAQSEVMKRFEALLADEQIRAAMPVPEVAEAARRPGLGLAGIAAVLMEGYADRPAIGERAAEIVVDADGRRTRRLLPAYVTTTYRDLWTRAGHIAASWQHDGRNPLRAGDFLCILGFASGDFAALELAAIRQGLVTVPLQSSAAAAQWHSIITETESRTLAVSLELLAPALECVLDGTAVTSIVVFDFEPEDDRQAEAFAAAQRRLEGTGITLESLATVVDRGARLPEAPLHVPADENELAVLIYTSGSTGTPKGAMYPHRLAAGMWLGPTVIPAPVMNFCYMPLSHVAGRMVLNGTFSRGGTAYFAASSDMSTLFEDIALVRPTEVFFVPRVCDMVYQRYQSETQRRIAAGESAEDADRIVKTALREEFLGGRMARVMVGSAPISAEMKEFMRSVLGQPIIDGYGSTEAGGGLLIDNEIRRPPVIDYKLADVPELGYFSTDKPYPRGELVVKSMQQIPGYFKRPEVTAEIFDEDGYYRTGDIVAEIRPDYLVYVDRRNNVLKLSQGEFVTVAKLEAVYATSPLIAQIFVHGSSERSHLVAVIVPTDAARALEPAERIAAITESMQRIAKENGLESYEIPRAFLLEDEPFTQDNGLLSGIGKLLRPKFKERFGERLEQLYTEQAQRQRDELAVLRREAADRPVIETVCRAARAVLGGGEPQPDAHFTDLGGDSLSALSFSTLLAEIFGVEVPVGVIVSPANNLDRLAAHIEAERDSGGTRPTVATIHGGKEIRATDLTLDKFLDAATLAAAPALPRASQPPRTVLLTGANGYLGRFLCLEWLQRLDGTDGTLICVIRGRDAETARRRLDEVFDSGDPELLRRYRELAQRRLRVLPGDIGEPNFGLSQQDWQELADTVDLIVHPAALVNHVLPYGQLFGPNVVGTAEVIRLALTSTLKPVTYLSTVAVAAQIDPAVFTEDGDIREISAVRSVDDGYANGYGNSKWAGEVLLREAHDLCGLPVAVFRSDMILAHSDFAGQLNLPDMFTRLLLSVLATGLAPKSFYALDSHGNRRRAHYDGLPADFTAAAITALGARVTEGFETYDVLNPHDDGISLDEFVDWLIESGHAIDRIDDYRDWFTRFETALRTLPEHQRGASVQPLLHAYRRPGLPIAGSVLPAKRFQAAVQQAKLGPGGDIPHLTRELIDKYVADLKLRGLL

SEQ ID NO: 177 - protein, 1054 aa, Artificial Sequence
  Acaromyces ingoldii
MRLVYVIENIIKKYHDRPAIGERVKRCIKDAKSKRIVCQLTAKYQTITYQQLWSRAESIANEWYQHDQYPLKASDKVAILSFIHSDYIAINLACVQINAIIVPLQTNLSIKELTLILQEIEPRIIAASIEYLPIAVELAKNNNSIKRIIVFDYDPSHDNAEKLEQLQNQLIIKIEELPNIIRLGSQLPKVPYPENSDDTSSISMIIYTSGSTGAPKGAIYTEKFVSNMWDASLFANNTNKENRTVLYLPICHGLASQQLYNQLAKGVTCYLVAKSNLSTLFEDITLVKPTELLLIPRVAEMILQLYQSELEGRKKTIHDPLLDSKLKKEIRINIFGGRVTQIFYSSAPLTNKLTDFIESLFEVKLLNMYGSTETLAICINNKILKPPVEDYKLIDVPVLGYYSTDKPYPRGELLLKTATIIPGYYKHPELYSQLFDEQGYYMTGDIVKETAKDHLVVIERKKNVIKLSQGEFITTTMLETLLKDSPLIKDIFIYGNSEWSYLLAVIIPIPELLYRYNKQQREIKRLIHQSLEKIAKDSGLKPYEVPRDFLIDTEPFSQKNGLLSELGKPLKQKIEAHYIDDLNKLYQEICNYDFSKFSQQINKENILETVIKLTQYLVGSPGMVINSAATFCQFGGDSLSTLQFSLELEKIWGVMIPVDMIANPTCTLDDIADYIKSNQHIINSCPTFATIHGIDKKKIYASQLALDKFIDPEIFQQIKNSSRSLSSFHNVLLTGANGYLGKFLCLALLEELNKTDGKLICVIREKDNESAKQRLMNTFSPHNDQLALKFKQLADKHLTVYAGDLTKPKLGLDEKTWHYLSQNIDHIFHAGALVNHILPYQHLFETNVLGTAELIKLALVNHLKPFIFISSIIVAIPSDNTKPLNEDANICEAIPYQEINNQYANGYAISKWASEILLYEAYNRFKLPVTIFRPSMILAHRLYDTEFNITDVFTRLLLSIINTKIAPKSFYQSNSNLSPHYNGLAVDFVVSSIIKLSKNNHNQRLTFNMVNPQNDKVSLDTIIDWLINSGINIKKSMIMKNGINNLNWPHGKIT

SEQ ID NO: 178 - protein, 1176 aa, Artificial Sequence
  Rhodococcus sp. Leaf247
MTSTITREHDRARKVSERISELFADDDEFRAAAPDRSVSDAATELSPDLIRMVDEVMSRYASRPALGRRAHDVTADANGRHVRSLLPRIDTVTYADLWSDARSLATAVADVVTPGSFIATLGFASAEYVVAELATVWSGAVSVPLQAGAAARRLVDITAEVEPVVLVVDSGHLPVASDIVAACPTVRRVVVLDHDSRVDDDADRLRTARETVADSGVVVETLAEAVQRGAASAPVPRAESGDPERIATLVYTSGSTGTPKGAIHTERIVARQWSTAHWYSRSDDDAGENTPPVITLDYLPMSHLAGRALVFTTLASGGTVHFTASSDLSTLLEDFSLARPTVAMLVPRVCDLLRQTALGRIDKEAHRTGRSADDVRSEVLADMRSTTLGGRILSAVVGTAPTSPEVVEFMSELLETQVQNNYGSTEAGMVLFDGVVQRPPVTEYRLDDVPELGYLTSDRPHPRGELLLKTTSLIPGYYKRPDVTADMLSDDGFYRTGDVVEETAPDHLVYLDRRKNVLKLAQGEFVALSRLESIYASADAVDQIFVHGSGERAYLLAVVVPTDGADAREVLASVQRVARAEELESYEIPRDVILADEPFTVANGLLSGANKQLRPALTDTYGAALEARYRDIDEGQSTKLGELRRRGPGAPVAETVAEAAAALLGCADTDVEPSARFIDLGGDSLSALTFATVLHDIFDIDVPVSVVISPTSDLAAVAAYIEKTVASDSGTTTFASVHGRGATEVHADDLRPDAFFDAEFLSAAESADPVRTEVSTVLLTGANGYLGRFLCLEWLERMAAVDGTLLCVVRGRDADDARARLDAAFDSGDDELTARYRALAETTLQVVAGDVGDPMFGMSPEAWTALCTGVDRIVHPAALVNHALPYEQLFGSNVVGTAEVIRLALTDHVKPVTYLSTVAVAAGVTDFVEDGDIRDVSPSRPVDQSYANGYGTSKWAGEVLLRNAFDRFSLPVTVFRSDMILAHPRWTGQLNVPDIFTRTILSVIATGIAPETFYRTDTGVPTDDAGRPRGHYDGLPADFTASAITELGSRGVDGYRTFDIINPHDDGVSLDTVVDWIVDSGRTIRRISDHDEWFREFSDALAALPASQRTHSVLPLVHAYAHPDTPTPGSPLPAEVFRAAVKEAGLGDAGEIPHVTKDLIEKYVRDLESLGLLSAR

SEQ ID NO: 179 - protein, 1145 aa, Artificial Sequence
  Streptomyces sp. Root1310
MPVAGVHEESAGRRPRLSEIVRRALAAYAERPALGERARQYVSVDGRVTVRLLPRFDTVSYGELWSRLSAVAADWYHHPQHPLREGDFVAILGFAGTDYTTVDLACGQVGAVAVPLHTNASVDHIRHLVAEAAPRVFATSTDRLATVLEALSGQTCVHRILVFDHHPELAEHREALAAAGRLLATTGAPMSLELLSDVVGRAGSLPPVPELPPDSSADGALSALVYTSGSTGTPKGVMFPESTVALMWRPPEGPDNRYPLITANFLPQSHLVARRLVIKTLATGGTANFVARSDLSTLLDDLALIRPTEIAMVPRVCELLFESYHARLNQRAANGELRDADHAEVIAHLRDHVLGGRVIHAPCGSAPLAPELAAFLRDALDVPLLDSYGTTETGLVMLDHRVQSPPVLHYKLADVPELGYSTADSPHPRGELLVRTALITPGYYRRAEETAEVFDQDGYYRTGDIMAETAPGELVYVDRRKNVLKLSQGEFVALSKVEAALVASPLVRQIFVYGNSSRAYLLAVVVPTPEAIAQAGDGAALKAEVSRSLQSVAAQAGLAPYEVPRDLIVETVPFSQDNGLLTDSTKQLRPRLKERYGERLERRYAELAAGQSAELRAVWQERDRPVAETVARAAQALLAGLDVEPGPERRFTELGGDSLSALSFANLLREIFGVEVSVGTLLGPANSLEQIAGHVERLRGTATARRATFASVHGEHATSVRAADLTLDKFIDAATLAACTALPRPAGEPRTVLLTGANGYLGRLLCLEWLQRLAPVGGTLVCLVRAADDSAARQRLEEALDSGDTALKSRFAELTADGALRVLAGDIGATRLGLSEQDWQQLTATVDLIVHPAALVNHVLPYRQLFEPNVAGTAEVVRAALTTRLKPVVYVSTVALAAHGAATADEDTDIRVGHPGHAIDDSHAGGYATSKWAGEVLLREAHDLCGLPVTVLRSGMILAHARYAGQLNVPDAFTRLLLSLIATGIAPDSFYDGAEGGRRPRAHYDGLPGDFVAAAVAALGFRTAGFRTFNVVNPHDDGVSLDTVVDWLTDCGITVRRVGGHRKWREQFEAALRTLPQAQRPYSLLPLMAAWREPLVPRTTSALPAERFRAAVRTAGIGAEQDIPHLSRSLIEKYVADLRHLGLIS

SEQ ID NO: 180 - protein, 1181 aa, Artificial Sequence
  Sphingobium sp. MI1205
MATEFDQSHLVEKAVARVQQMSISDPEMAARIPDPKVTEAIKDPALSYRQIIATVLEGYADRPAFGSRHYTLEQDAAGRTVRRYDMRFDTISYGELRRQVEGIANLWKHHPDHRAAPGDKISFIAFTGAEMAAVDLACNYAQTVSVPLQANLPAPDMRQILTDVAPTVLAASIDNLELAVGYAIDQDTIRSLIVLDADERVDDDRDAIAAARATLAKAGGRVALITFDAAVDYGSIHEFQPLAETTPDHVSMIMYTSGSTGKPKGAIIHDAISSQFWNETIPAYRPTVQVAYAPMNHFMGRTMVHSTLAQGGTANFTLRSDMSTLFDDFRITRPTMILFIPRVCELIYQHYQSEVQRRVTLGEKEAMADAAVRQEMRASYLGDRLCGGGVGSSPTAPEVRRFIAECWEMPLVEGYGQTEAGAAAMTSENRLTSNMITEFKLVDVPELGYFTTDKPYPRGELYVKTSKMFQGYFKRPEATAAVFSEDNFLKTGDIMEQRGPDHLVWVDRRGNVIKLSQAEFVAVGPLETTYLGNSSLIEQIFVYGSSYRSYLLAVVVPDLSVARAMLGHDPNEAELRELILSEFKTVARKAELKNFEIPRDVLIEHERFTYENGLLSSARKPLRPNIKRKYVDQLESMYEEMDKQQQVELARLRASADGTTAERVAGAFKANLGLPQVDADNPRSYGDLGGDSLGAVGLSLLFEEMFGVTVPVSAILHPAATVQWLAEHVDRAQSGETVRMSDVHPDPDLLRPSDLKLYKMIDEALLTDASHAAPPAAEAKNVLVTGANGFLGRFLCLEWLEHVAPRGGTVYCLARGKTEAEARARLEAAFDRGDAALLARFRQLADRHLRVLCGDLAEKRFGLDSETYDMLTRELDQIVHSAALVNHRLSYANLFAPNVLGTAELIALALTSKLKRFDYISTVGVPALLPSLTGAPEATDVRDVPDPVRLSDGYANGYAASKWAGEVLLREANELFGLPVNIFRPNMILPHRNYSGQYNETDMITRLLFSLVKTGLAPKSFYALDANGNRPRAHYDGLPVDFLAAMIREVGAEPYTGFQSFNMVNDHDDGYSLDSFADWIESAGYRVDHIADHSAWAERFEGKLRNLSEEDRQNSSINILAHFAQPHEARESPLDSSDFAKRVKSLKVGPVMPHLDEAYIHKYLADMQKRGLIAEPEAVAA

SEQ ID NO: 181 - protein, 1132 aa, Artificial Sequence
  Streptomyces yunnanensis
MAEIMERYADRPAVGERAREFVRDPESGRLSLNLLPRYELMTFGELWGRIRSVAAEWHHHPESPLRAGERVVFLGFSSIEYSVVDLACVHLGAVGVPLQTSSPVAQLGAIVEETEPAMMATSLERLDTAVELTLKSPSVRRIVVFDHRPQLVEETEAFAAARERLVRGGHAAMLDALPDIVDRGSALPAAPLYTPDDGDDPLALLIYTSGSTGTPKGAMYTERLASAMWGGAWAKLFSDEHAVTFHYMPMSHVAGHSSLKNTLARGGITYFTAASDLSTFFDDIALARPTEISLVPRVCEMLFQKYRSELGPYLGEGGGDGDSDTVGAEVRKHMRENILGGRIAWASCGSAPLSDELREFVESLLGFDLNIIYGSTEAAAISVNGELIRPPVVDYKLLDVPELGYFGTDTPYPRGELLLKTDAIIPGYYKQPELSAELLDDDGYYRTGDIVAEFAPGRHSVVDRRNSVLKLSQGEFVATTHLEAVFSVSPLVRQIFVYGNGERSYLLAVVVPSGPLAEFGGEEEFRGLLRDSFQRIARDQGLNSYEIPRGFLVETEPFSQANGLLSDHRKRRRPQLVQRYRERLEALYSAIAAEEADELTTVRRLGATRPVLETVQRAARALLGGALTEVSPDAHFRDLGGDSLSAVSFANLLRDTFDVRVPVDLVISPATDLRQLAAHIEAKRAAGPPQVTYASVHGAESPEVHAADLTLEKFIDADTVEAAGSLPRPADEPRTVLLTGASGYLGRFLCLEWLERLSRTGGRLVCVVRGGSAVAARKRLDEALSSGDQTLTRRFQELADAHLEVVAGELAEPRLGLDEETWRRLADEVDTIVHAGALVNHVLPYQHLFDANVVGTAELIRLALTGRLKPFTYVSSVAVATSWTGGPALDEDSDVRAAVPVQRVEEGYASGYATSKWAGEVLLREAHDRCGLPVTTFRSNMILAHSRYPGQLNVPDAFTRLLFSLVATGIAPHTFYRADETGRPERAHYDGLPVDFTATAVVALGAHAATGYRTFSLVNPHDDGISLDTFVDWLNEAGHRIDRVADYDGWLLRFESALRALPEQRRQHSLLPLLHGYASPEPVVPGSAIPSTRFRAAVLNAGIGQDGDIPRVSAELIRKYADDLRPFLAAQD

SEQ ID NO: 182 - protein, 1174 aa, Artificial Sequence
  Mycobacterium sp. KMS
MSTETREARLQQRIAHLFATDPQFAAARPDPRISDAVDRDDARLTAIVSAVMSGYADRPALGQRAAEFVTDPQTGRTTMELLPRFDTITYRELLDRVRALTNAWHADGVRPGDRVAILGFTGIDYTVVDLALIQLGAVAVPLQTSAAVEALRPIVAETEPMLIATGVDHVDAAAELALTGHRPSRVVVFDHREQVDDERDAVRAATARLGDAVPVETLAEVLRRGAHLPAVAPHVFDEADPLRLLIYTSGSTGAPKGAMYPESKVAGMWRASAKSAWNNDQTAIPSITLNFLPMSHVMGRGLLCGTLSTGGTAYFAGRSDLSTLLEDLRLVRPTQLSFVPRIWDMLFQEFVGEVDRRVNDGADRPTAEADVLAVQRRELLGGRFVTAMTGSAPISLEMKTWVENLLDMHLVEGYGSTEAGAVFVDGHIQRPPVLDYKLVDVPDLGYFSTDRPHPRGELLVRCTQLFPGYYKRPDVTAEVFDDDGFYRTGDIVAEVGPDQVQYLDRRNNVLKLAQGEFVTISKLEAVFAGSALVRQIYVYGNSARSYLLAVVVPTDDAVARHDPASLKTAISASLQQAAKTAGLQSYELPRDFLVETQPFTLENGLLTGIRKLARPKLKARYGDRLEALYVELAEGQAGELRTLRRDGAKRPVAETVGRAAAALLGAAAADVRPDAHFTDLGGDSLSALTFGNLLQEIFGVDVPVGVIVSPAADLASIAAYIEAEQASTGKRPTYASVHGRDAEQVRARDLTLDKFIDAETLSAATELPVPIGEVRTVLLTGATGFLGRYLALDWLERMALVDGKVICLVRAKDDAAARKRLDDTFDSGDPKLLAHYRKLAADHLEVLAGDKGEADLGLPHQVWQRLADTVDLIVDPAALVNHVLPYSQLFGPNALGTAELIRLALTTRIKPFTYVSTIGVGAGIEPGRFTEDDDIRVISPTRAVDTGYANGYGNSKWAGEVLLREAHDLCGLPVAVFRCDMILADTTYAGQLNLPDMFTRMMVSLVTTGIAPKSFHPLDAKGHRQRAHYDGLPVEFVAESISALGAQAVDEAGTGFATYHVMNPHDDGIGLDEFVDWLVEAGYRIDRIDDYAAWLQRFETALRALPERTRQYSLLPLLHNYQRPAHPINGAMAPTDRFRAAVQEAKLGPDKDIPHVTPGVIVKYATDLELLGLI

SEQ ID NO: 183 - protein, 1188 aa, Artificial Sequence
  Mycobacterium intracellulare ATCC 13950
MTDIVTDPGREQRLTERVEQLYASDPQFRAAAPSPEVTEAAHRAGLRLAEVVDIYLSGYADRPALGQRACEATRDPATGRAATSLLSGFETITYRELGDRVAALAAAWHSGLPGGLRPGDFVGVLGFTSIDYVVHYLACIRLGAVFVPLQTSSTAAQLAPIVAETAPRVLAVSVESLGTAVDVVLEAPSVQRLVVFDYTGDDDEQRDRYDDARARLRGAGHRAGVVALAAELSSGRGRPAPDAYVPGHGENPLATLIYTSGSTGTPKGAMYTADMMTRIWQRPHSPSVDIGRVVPAIHLQYMPLSHVYGLEWLIATLSSGGIGYFAAKSDMSTLFDDIGLVRPTALNLVPRVCDMFFRRYRKELDQRAGDDLGAEQRDDAVKAELRQDFIGGRVVSAMCGSAPLSKQMHAFMESLLDVTVADGYGATETGGGIMRSGRIRRPPVTDYKLVDVPELGYLTTDKPYPRGELHLKASNVIPGYFKHPELSAQIFDDEGFYKTGDIMAELAPDHLMYLDRSNNVIKLSQGEFVAVSQLEATFSTSPYIRQIFLYGSSEQPFLLAVIVPNVDAVGGGDAHALIAESLQQIAADSHLHPYEVPRDFLLEPQRFTRDNGLLSGVGKLLRPALKARYGERLDAMYAEIEASHGNQLDELRSASRELPTIDTVRRAAAATLGLPADAALRGDAKFIELGGDSLSAFSFATLLSEIFHIDVPVQTIVSPTATLATVANYVDGERTSESTRPTFASVHGRGATVARAADLTLARFIDDDTLAAAPHLPAPTGAVNTVLLTGANGYLGRFLCLDWLERLAPTGGTVICLARGADPTAGRQRIEAAIDSGDAELSRRFRQLADHHLQVLVGDVGAANLGLDTPTYERLARSVDLVVHSAALVNHVLPYSQLFGPNVVGTAEIVKLAISQRLKPINYISTVAVTTLPDGSFIGEDADVRSASPSRSLDESYASGYATSKWAGEVLLREAHDLCGVPVAVFRSDMILAHSDFAGQLNVPDMFTRLILSLVATGIAPRSFYQLDASGHRQRAHYDGLPADFTAEAITTLGARTRQGYHTYNVLNTHDDGVSLDTFVDWLIADGHKIERVDDYDEWLARFTAAMKSLPDNQRKSSLLPLMSAYAKPGQPTHGTGMPAEKFRAAVQSAGIGRDSDVPHVTQALIDKYVADLQRLGLLRTRAGAHAG

SEQ ID NO: 184 - protein, 1173 aa, Artificial Sequence
  Mycolicibacterium celeriflavum
MTSDTRETRMARRISDLFATDPQFAAARPNDHIAHAIEASELTLPQVLRTILDAYADRPALGQRAVEFITDADTGRTSARLLPRFDTITYRELSDRVDAVAAALTHNGVQPGERVAILGFTSIDYTTVDMALLHLGAVSVPLQTSAPVGQLRPVVAETEPVAIASSVDLLDDAVEVMLTGHLPQRLMVFDYHAELDDHRAALAAARSRLAETTVAVETLGDTLARGRDLPTPTPFDFGDDDLALLIYTSGSTGTPKGAMYPAKMVAGSWRRSSMAMWGTGEALPSITLNFMPMSHMMGRGILYATLGAGGIGYFVASSDLSTLLEDLALVRPTQLNFVPRIWDMIFQQFQSEVDRRTTDGIDRTAAETEVLADLRENLLGGRFVSAMTGSAPISAEMTTFVESLLDLHLTDGYGSTEAGAIFVDGQVARPPVIDYKLADVPDLGYHRTDRPHPRGELLIKSETMFPGYYKRPETTAEVFDAEGYYRTGDVVAELGPDRLVYLDRRNNVLKLSQGEFVTVSKLEAAFDTSPLVRQIFVYGNSARSYLLAVIVPTDDALARHDDDSLKTAITESLQDVARTAGLQSYEIPRDFIVETTPFTLENGLLTGIRKLARPKLKECYGDQLEQLYSQLADSQASELRALRRHGADRPVIETISRAAGALLGAAAADVHPDAHFTDLGGDSLSALTFGNLLTEIYDIDVPVGVIVSPANDLTALANYVEAARRGSVRPTFASVHGRDAVEAHAGDLVLEKFIDAETLAAPPSLPGPASEIRTVLLTGATGFLGRYLALEWLERMAMVDGKVICLVRAKDNASARARLDDTFDSGDPELLGHYRELAADHLEVIAGDKGEADLGLDRRTWQRLADTVDLIVDPAALVNHVLPYSQLFGPNVVGTAELIRMALTTKIKPFVYVSTIGVGAGITPGQFTEDGDIRVISATRKVDDSYANGYSNSKWAGEVLLREAHDLSGLPVSVFRCDMILADTTYAGQLNLPDMFTRLILSLVATGIAPFSFYEVDGDGNRQRAHYDGLPVEFIAEAISTLGAQVGHEPGAAFETYHVMNPYDDGLGLDEFVDWLIDAGYRIERVGGYATWLRRFDTAVRALPERQRQASLLPLLHNYQRPEVAIRGSIAPTERFRTAVQDAKIGPDKDIPHVTREVIVKYVTDLQLLGLVL

SEQ ID NO: 185 - protein, 1166 aa, Artificial Sequence
  Mycolicibacterium fallax
MSSDPREDAVARRMMEVYSGDPEVRAAMAVESVSAEIRRPGLHLAEVVETVMSSYAERPALGRRAFEYTVDPATGRCAAHLLPRFDTITYGELWERVRAIAGAWHHDPEIALVPGDFVAIVGFTSSDYVALDLACIYLGAVVAPLPATAGAEELRGYLAEIEPRILAVTPDLLETAVAAIGDGLSKSVRLIVFDRCPGDDAERERIESAASMLDNGKILDTLEDVVERGARYPVPAMFSHSDSDDPLALLIYTSGSTGSPKGALYTERLCLRAWLVGPGAGAAITVNYMPLSHIGGRMTLFGVLARGGTNYFTAASDLSQIFDDIALVRPTELTLVPRLCDMALQTYHNELNRRSAEEIDVSRLEAEVRENLRDKFFGGRLLIAGFGSAPLAGQMRTFIESVLEVPLRDGYGSTEAGGGIVLDNQVQRPPVIDYMLADVPELGYFSTDRPYPRGELLVKSSTQIPGYFKRPDLSATMIDSDGYYHTGDVMAQIGPDRLTYIDRRSNVVKLSQGEFVTIARVEAVLATARWVRQIFVYGSSERAYLLAVVVPTGSALREYCDPAELKEAVTKSLRTAAAVADLRPYEIPRDVLIETEPFAVANALLSGLGKLLRPELVRRYGASLQQMYADLEHAERQALRSIQAQVRFRPVREIVGRVASALLGSPAATLRGDVRFVEMGGDSLTAVALSKQLGELYGVDVPVALVIDPTIDLDRLSDYVQRQRSSNDMHGPRFESVHGSPADVRAADLVLDQFIAPAALGAAESAAPPTAAPHVVLLTGATGFLGRFLCLEWLSRLQRDGGTLICLVRGDDAEHARVRLESAFESTPPLAEQFRKLSVDRLEVVAGDVTARELGLPPRIWDELACRVDSVVHAAALVNHVLPYEDLFGPNTVGTAELIRFAITSRRKRFSYVSTVGVAAVAGSTVFDEDSDVRQWNPAPDDRANYATGYSTSKWAGEVLLRDAHDRYGLPVTVFRSAMILAHRHYPGQVNVSDRFTRLLHGVLTTGLAPATFYSTRPGSVRAHYDGLPVDFVAEAMVTLARKAQGDFRTYHVVNPHDDGIDLDSFVDWMIDAGFRITRIDDYAVWVERVAVVLSGLSGEHRQNSLLPLLDSYRNPETPVAGSALPATAFVAGVRAQRIGDHGEIPRITPDLILEYADDLRRRALL

SEQ ID NO: 186 - protein, 1157 aa, Artificial Sequence
  Nocardia terpenica
MVDERVVERIAELEATDAQYAGARSDRAVAARVNDPELRLPEVVRAALDGYADRPALGARAVEVVAEPGTGRRVARLTRRLETVTYRELGERIAAVAGGLRRDPDGNSLVSPGDRVVILGFTSIDYTVVDLALTQLGAVSVPLQASSSAQQLRPIVVETEPRVAAASIDHLLDAVELALTGFAPARLVVFDYLPEVDAQRELFDTAAERLAGSGVVLESLAAVADRGAGGFTPEPPVTDDPLSLLIYTSGSTGAPKGAMYPESLAIRLWRGGFGLEDEDRAPGAWITLNFMPMSHVMGRATVFGTLGRGGIAYFGGSSDMSTFLEDLALIRPTQLQFVPRVWELLFQEYQRALDRYTPDEALTVLRRDVLGGRALAGLTGSAPISAEVYEFADRLLGTHVIELYGSTEAGGIFVDGRVLRPPVRDYKLADVPDLGYYSTDRPYPRGELLLLTETLFPGYFRRPEVTAEVIDEQGYYHTGDVVAEVAPDELRYLDRRNNVLKLSQGEFVTVSKLEAAFAASPVIEQIYVYGNSSRPYLLAVVVPTEKALAGDEAAVKSRVTEGLRAIAAEVGLQSYEVPRDFLIETTPFTVENGLLTGIRKLARPKLKQHYGERLEQLYHDLAQGQAAELRALHEGAADRPTLETVTRAAAALLGVAVADVAADARFTDLGGDSLSALTFGNTLNSIFEVEVPVGVIVGPATDLRALAEYIEHESATRGARPTFASVHGATATEVRASDLTLDRFIDPAVLAAAPSLPRATGPVRTVLLTGATGFLGRYLALEWLERVAQQDGTVICLVRATDDAAARERLDRVFDSGDPALWERYRGLAQRHLRVLAGDKGSANLGLDEQTWRELADTVDLIVDPAALVNHVLPYSELFGPNVIGTAELIRLALTGRIKSYDYISTVGVGDQIEPAAFTEDADVRAISAVRRIDDSYANGYGNSKWAGEVLLREAHDLVGLPVAVFRCDMILADGVSIGQLNLPDMFTRLMLSLVATGIAPESFYELDADGHRQRAHYDGLPVDFIAAAVAELGVGEGFSTYHVMNPHDDGIGLDQYVDWLVEAGYRIDRIADYRSWLEQFETKLRALPERQRKASLLPLLHNYQHPTPPLNGAIAVTDRFRAAVQEAKIGPDKDIPHVGPAVVVGYVTNLEHLGLL

SEQ ID NO: 187 - protein, 1173 aa, Artificial Sequence
  Mycolicibacterium peregrinum
MPTDTREEQQVRRVAELYATDQQFADARPDATISDLVKRAGSRLPEIVRTVMEGYAERPALGQRAVRFVENPATGRTSTELLPRFETLTYRQMADRVGAVAAAWAGDPIKPGDRVCMVGFASVDYATVDLALVLLNAVPVPLQANAAVAQLRPVVAETEPTVIAASVDYLSVAVGLVSTEHAPARLVVFDYHSQVDDHREAVDAARARLAEMGSPVVVELLADLVERGTMLPSPEIECGDDDSLALLIYTSGSTGTPKGAMYQRDLVALTWLSSSWPATHEEHVAPSITLNFRPLSHVVGRAMLYGTLGVGGTAYFAASRDLSTFLEDLALVRPTQLDFVPRVWEMLFEEFRREVDARSGPHRDRATVEAQVMAEQRQNVLGGRYVAASTGSAPMSADLRAWAESFTGMHLTDIFGLTESVLLLIDGRVQRPPVIDYKLVDVPELGYFGSDRPFPRGELAVKSTTQFAGYYKRPELTAAAFDSDGYYLTGDIMAERGPDQLTYVDRRNNVLKLSQGEFITVSKLETLFSGSALVRQIYIYANSARSYSLAVVVPTEDALKQHDVQSLKPAITEALRDIAKAADLQSYELPRDIVVETTPFTAANGLLTDLGKPARKKIQQHYGERLERLYADLAEDQTKKLRALRDGAADRPLSDTISQAAAAVLGTVDVALQPDAHFTDLGGDSLSALTFGNLLRDIFGIDVPVGVIVSPANDLAAIADYIDAERNGSKRPTFAAVHGRGATEVRARDLTLDKFLDETTLHAAPSLPTPATEVRTVLLTGATGFLGRYLMLEWLQRMEMVGGTVIALVRAKTDAEARARLDRTFDSGDPKLLAHYRKLAADHLEVIAGDKGEADLGLDPQTWRRLADTVDVIVDSAALVNHILPYSELFGPNALGTAELIRIALTSKLKPYTYVSTIGVGDQIDPGRFVEDADIRQISATRAINDNYANGYGNSKWAGEVLLREANGRCGLPVSVFRCDMILADTSYAGQLNLPDMFTRLMLSLVATGIAPESFYELDADGNRQRAHYGGLPVEFIAAAISTLGTQILDSDNGFQTYHVTNPHDDGIGLDEYVDWLIDAGYQIARVADYGDWVQRIETALRALPEKQRQASLLPLLHYYQKPQPPIPGSMAPADRFRDAVHEAKVGPDNDIPHIGQSTIVKYATDLQLLGLL

SEQ ID NO: 188 - protein, 1184 aa, Artificial Sequence
  Mycobacterium sp. E1386
MLADSHTEKLARRVADLLTNDAQFAAALPREDVSRAILRPQIGLAGLMRTVADGYADRPALGRRAVEVVREASTGAQRLEMLPWFDFVTYRELWQRVSAVASALADGAVSAGDRVATLGFCSVDYTTIDLAAPLMSAVSVPLHAGAPVGQLRRIVEEIEPSVIACSAAYLNDGVELALGAATPAILVVFDRHPQLDEHQRNLDEARARLAAAGSSVVLETIEELLQRGAARPLPPEPPADDDRLAAIVYTSGSSGSPKGAMQPEGLAKGVWTVTAAVLTERGFAIPAITLNYMPMSHTAGRAMLYSTLGAGGTAYFTAKSDLSTFLDDLSLVRPTQLNFVPRIWEMLHGEYRNELRARGGGAATAGPTEEDILADLRTRVLGGRYISALTGSAPISAHLADWVERLLDSHLMNALGATESGSVVIDCKVQRPPVTAYKLADVPELGYFSTDRPYPRGELLIKSNTLFRGYYKRPELTAEVFDEDGFYRTGDVVEELGPDELRYVDRRNNVIKLSQGEFVTISKLEAVYADCDLIHQIYVYGNGERPYLLAVVVPTEAALAQRDIDALKPMLIRSLQEAARDADLRSYEVPRDIIVEPYPFTLDNGLLSGIRKPSRPNLLRHYGARLEQLYDEHAQAQNTRLGELRDRAATQPIVETVCAAASALLGVPGATPPSSVRFTDLGGDSLTALTFADALNDIFAVDVPVDVLISPANDLQSVANFIEAQRATDTRRPTFASVHGAGATVADTRDLTLDKFLDSATLEGAHALAGPNSDVRTVLLTGATGYLGRYLLLEWLQRMALVDGTVICLVRAKDDAAARTRLDNTFDSGDANLLSRYRRLAADHLEVLAGDKGDADLGLAQASWQHLADTVDLIIDPAALVNHMLPYRELFGPNVLGTAELIRLALTTRQKLIAYVSSVGVGATIDSAKFTEDADIRTISPTRLVDDTYANGYANSKWAAEVLLREANDHCELPVRVFRCDMIMAETTYRGQLNVPDMVTRLILSIAATGLAPKSFYLPDHDGRRARAHFDALPVDFVAESISTLTAIAAGEAKGFQTFHIVNPHDDAIGLDEYVDWMIETGCPIERIGDHDQWFGRFDSALRNLPEKQRQASLLPLMATYRHPLPPTRGAFAPADRFRAAVIDVAIGPAGDIPHVGKPIIEKYLTDLEALGLLDPCPGAPGEE

SEQ ID NO: 189 - protein, 1187 aa, Artificial Sequence
  Mycobacteroides abscessus subsp. abscessus
MTVTHDIDPQQEQLARRIENLRDSDPQFRATQPDPAVAEQVLRPGLHLSEAIATLMTGYAERPALGERARELVTDDDGRTVLRLLPRFDTVTYGELWSRTTSVAASWHHDPAHPVKSGDLVATLGFTSIDYTVLDLAIMILGGVAVPLQTSAPASQWTTILAEAEPNTLAVSIELIGTALESVLATPTVKQVVVFDYTPEVDEQREAFEAAGARLAGTGIAIETLDSVVTRGAELPAAPLYAPSAGDDPLALLIYTSGSTGAPKGAMHSENIVRRWWIREDVMAGTENLPMIGLNFMPMSHIMGRGTLTATLSTGGLGYFAASSDMSTLFEDMELIRPTALALVPRVCDMVFQRFQTEVDRRLAGGQAADAEAVAAQVKAEIRDNLFGGRVLAVMVGSAPLSEELGEFIESCFELHLTDGYGSTEAGMVFRDGIVQRPPVNDYKLVDVPELGYFSTDKPHPRGELLLKTDGMFLGYYKRPEVTAGVFDENGYYMTGDIVAELAPDNIQIIDRRNNVLKLSQGEFVAVATLEAEYANSPVVHQIYVYGSSERSYLLAVVVPTPEAVAAAKGDEAALKATLADSLQDIAKEIQLQSYEVPRDFIIEPQPFTQGNGLLTGIAKLARPNLKAHYGERLEQMYADIAEQQAAELRALHGVDPDKPALETVLKAAQALLGVSSAELAADAHFTDLGGDSLSALSFSDLLRDIFAVEVPVGVIVSAANDLGGVAKFIDEQRHSGGTRPTADSVHGAVHTEIRATDLTLDKFIDEATLHAAPSLPKAVGIPHTVLLTGSNGYLGHYLALEWLERLDKTDGKLIVIVRGKNAEAAYRRLEEAFDTGDTQLLAHFRSLAGKHLEVLAGDIGDPNLGLDAATWQHLADTVDVIVHPAALVNHVLPYSQLFGPNVVGTAEIIKLAITTKIKPVTYLSTVAVAAYVDPTTFDEESDIRLISAVRPVDELYANGYGNSKWAGEVLLREAHDLCGLPVAVFRSDMILAHSRYTGQLNVPDQFTRLILSLIATGIAPGSFYQAHATGERPRAHYDGLPGDFTAEAITTLGTQVPEGSEGFVTYDCVNPHADGISLDNFVDWLIDAGYRIQRIDNYTEWFNRFDTAIRGLPEKQKQHSLLPLLHAFEQPSGAEDHGVVPAKRFQHAVQVAKIGPADQSGNTDIPHLSEELIVKYAKDLEQLGLL

SEQ ID NO: 190 - protein, 1149 aa, Artificial Sequence
  Mycobacterium sp. SWH-M1
MPTDTREERLAHRIDDLSATDPQFAAALPDEAIAEAIEDPQLRLPQIIATVLDGYADRPALGQRAVRLVADPQTGRTEAQLLPHFDTITYGELSTRIHHLLTALTDVDPGDRVAILGFTSVDYTVIDTTLVLRGAVSVPLQTSAPAATLRPIVAETEPVVFAASVDHLSDAVDLVADAESVGRLIVFDYRAEVDDHRDAIAHARARLADAGRSIEIVTLSEVLAHGATLPAAQPFTSPDDDPLLLLIYTSGSTGAPKGAMYPERLITNAWRRSGRSAWGGEQTTPSITLNFMPMSHMMGRGVLYGTLGAGGTAYFAARSDLSTFLDDLALVRPTQLSFVPRIWDTIAAEVAKEVDRRPDDLADVYADLRQSLLGGRHVMAMSGSAPLSPEMRTFVEDLIDIHLTDGYGSTEAGAVFVDGQVQRPPVIDYKLVDVPDLGYFTTDRPHPRGELLVKSETLFPGYYKRPEVTAEMFDPDGYYRTGDVVAETGPDQLVYLDRRNNVQKLSQGEFVTVSKLEAVFGDSPRVRQIYVYGNSARSYLLAVVVPTEDVLGRDDAKALVAESLQNVARAAGLQSYEIPRDFLIEPTPFTLENGLLTGIRKLARPRLKEHYGEQLEALYAELADGQADEMRTLRADGANRPVLETVGRAAAALLGTAATDVQPDAHFTDLGGDSLSALTFGNLLRDIFDVEVPVGVIVSPATDLASLAAYIEAQRQPGAKRPTFTAVHGAGATEARARDLTLDKFIDAETLSAAPSLPGPNTEVRTVLLTGATGFLGRYLALDWLERMDLVDGKVICLVRAKDDDAARARLDATFDSGDETLLAHYRELAADHLEVLAGDKGEADLGLDPQVWQRLADTVDLIVDPAALVNHVLPYSELFGPNAVGTAELIRLALTTRIEPGKFVEDGDIRQISAVRQIDESYANGYGNSKWAGEVLLREAHDLCGLPVSVFRCDMILADTTYAGQLNLPDMFTRLMFSLVATGVAPESFYQLDADGQRPRAHYDGLPVEFIAEAISTLGAAVARESKSGFETYHVMNPYDDGIGLDEFVDWLIEAGYPVHRVGDYAAWLARFTAAINALPERKRQASLLPLLHNYQRPEIPISGSIAPTDRFRTAVQEAKIGPDKDIPHITPAVIVQYVSNLELLGLL

SEQ ID NO: 191 - protein, 1184 aa, Artificial Sequence
  Mycobacteroides abscessus subsp. bolletii
MTVTNETNPQQEQLSRRIESLRESDPQFRAAQPDPAVAEQVLRPGLHLSEAIAALMTGYAERPALGERARELVTDQDGRTTLRLLPRFDTTTYGELWSRTTSVAAAWHHDAAHPVQAGDLVATLGFTSIDYTVLDLAIMILGGVAVPLQTSAPASQWTTILAEAEPNTLAVSIELIGAALESVRATPSIKQVVVFDYTPEVDDQREAFEAANTQLAGTGIAIETLGAVIARGAALPAAPLYAPSAGDDPLALLIYTSGSTGAPKGAMHSENIVRRWWIREDVMAGTENLPMIGLNFMPMSHIMGRGTLTSTLSTGGTGYFAASSDMSTLFEDMELIRPTALALVPRVCDMVFQRFQTEVDRRLASGDAASAEAVAAEVKADIRDNLFGGRVSAVMVGSAPLSEELGEFIESCFELNLTDGYGSTEAGMVFRDGIVQRPPVIDYKLVDVPELGYFSTDKPHPRGELLLKTDGMFLGYYKRPEVTAGVFDADGFYMTGDIVAELAHDNIEIIDRRNNVLKLSQGEFVAVATLEAEYANSPVVHQIYVYGSSERSYLLAVVVPTPEAVAAAKGDAAALKTTIADSLQDIAKEIRLQSYEVPRDFIIEPQPFTQDNGLLTGIAKLARPNLKAHYGPRLEQMYAEIAEQQAAELRALHGVDPDKPALETVLKAAQALLGVSSAELAADAHFTDLGGDSLSALSFSDLLRDIFAVEVPVGVIVSAANDLGGVAKFVDEQRYSGGTRPTAETVHGAGHTEIRAADLTLDKFIDEATLHAAPSLPKAVGIPHTVLLTGSNGYLGHYLALEWLERLDKTDGTLIAIVRGKNAEAAYRRLEEAFDTGDTQLLAHFRSLADKHLEVLAGDIGDPNLGLDADTWQRLADTVDVIVHPAALVNHVLPYSQLFGPNVVGTAEIVKLAITTKIKPVTYLSTVAVAAYVDPSTFDEESDIRAISAVRPVDELYANGYGNSKWAGEVLLREAHDLCGLPVAVFRSDMILAHSRYTGQLNVPDQFTRLILSLIATGIAPGSFYQAQATGERPPAHYDGLPGDFTAEAITTLGTQVIDSYETYDCVNPHADGVSLDNFVDWLIEAGYPIARIDNYAQWFTRFDTAIRGLPEKQKQHSLLPLLHAFEQPSAAENHGVVPAKRFQHAVQAAGIGAIGQDGTTDIPHLSRPLIVKYAKDLEQLGLL

SEQ ID NO: 192 - protein, 1175 aa, Artificial Sequence
  Curtobacterium sp. MCBA15_012
MEQPVQAHDVQGRGEQGLVDTSVEAVFAQHADRPALRHRDGATVTDTSYRELWERAGAVAAALGETVTPGDRIAVLGAPTADLLTLDLAAWILGAVSVPLQASAPVGALRAIVDETEPVWLGVTAEHAATARAVTEETDADVRTVLLDGTGSEDGDGDGSGDSAGSADGDGSDTAAAPATLEALVRRGAGRPRPTPWQPAPGEDPLALLLYTSGSTGTPKGAMYTRAMVERLWHALRPDPAAPDATTAPAEAAPAADVVGYAYLPMSHLTGRAAVLATLGRGGTVALATSTDLSTLFDDLRVYTPTELVLVPRVAEMIRQEGEREEQRRTAAAGADSDPAAVRAAVQADLRVRALGGRVRQAICASAPLTPELRAYIEGCLGTTLHDLYGSTEAGSILRDGVVQQPPVTEHKLVDVPELGYRVTDRPHPRGELLVKSTAVIPGYFRRPDVTAAVFDEDGFYRTGDVMAQTGPDTYEYLDRRNNVIKLSQGEFVAVAALEAVYGGTPEVRQVALHGDSRHAFLLAVVVPEDPAATEHDVLAALQRTARENGLAPYEVPRGVIVEPDPFTVENGMLSDARKLLRPRFTERYGERFAAVYDAVAEQQSGILVAALREHVADEPTVDTVVRAAREFLGAEVSTETAAAARFSDLGGDSLSALTFSGILEDVFEAEVPVGVITDPTNDLAAVAAYVERTAAEDRPTVTRVHGADPTVLRAEDLRLDRLLGTVPEPVTRATSEGQGPTSTSTSTDPDTSAGTGAGTTPRTVLLTGANGYLGRFTAIDWLERLAPVGGTLVCLVRGADDADARRRLEAAFTADPAFAARFAELGGALEVVAGDVSEHLLGLDEGRWHDLAARVDLVAHVAALVNHVLPYTALFGPNVVGTAEVLRLAIAAGSVPVTFVSSVAVAGGARPSATEDVAPDVPAALLERADVRTTIPTWTIADEYANGYGASKWASEVLLHDAHERYGVPVAVFRSDMVLAHPRWRGQVNLPDVFTRLVWSVLATGLAPASFVQPAPDGGRQRSHYDGLPADFTAAAIDAIGAAVTEGYRTFNVVNPHDDGVSLDTFVDWLVEDGHPVERVADHAEWVTRFRDALTALPEEDRARSVLPLLHAFAAPEAPHADSSIPADDFAAAVRDVRPLGSPEIPPLDHALISKVADDLTYLGLLAPAHVGAR

SEQ ID NO: 193 - protein, 1183 aa, Artificial Sequence
  Mycobacteroides abscessus subsp. abscessus
MTIDATADNTKEARRQRLGDRIRRLFTDDEQFRAAKPDTAVDTAVAQPGLRLAQVVATIMNGYADRPALGHRVQELVADAAGRSTLRPLPEFETVTYGELWGMARALASTWYHDPAAPVRAGDFVAMLGFTSVDYTAVDLACIHLGAVAVPLQTSASASNWTAILAESGPAVLAVSAELLDTAMESVLATPSLRHITVFDYHPGVDVQRESLESAQHRIAEAGLPISVDPISLAIGHGRALPDAPLFTAEEGTDPLALVIYTSGSTGTPKGATYSEKMVAKPWLRADTLSSKAEIPLINLNFMPMSHVMGRGSLVTALACGGLAYFAASSDMSTLFEDITLTRPTVVTLVPRVCDMLFQRYRNEVERRAGLDPAADLATLDADVKTDIRENLFGGRVLTIVCGSAPLSEELAAFIESCLDARITDGYGSTEAGVIVRNGRIQRPPVIDYKLVDVPELGYFSTDKPHPRGELLVKAESVFGGYFKRPDVTADVFDPDGYYKTGDIVAELEPDKIQIVDRRNNVIKLSQGEFVAIANLEAEFANSPLVHQICVYGSSERSYLLAVVVPTAEAYEQSGGDEDLLKRLIADSLAQVAREAQLQSYEVPRDFLLETEPFTAANGLLTGIAKLARPKLHEKYGARLEQLYSDIAAAQALELQALHSAGHEDKPVLDTVQRAVTALLGLSAAEVSPDAHFIDLGGDSLSALAFSDLLRDIFTVEVPVGDIVSAANDLTAIARTVERHREADGHSVTPTAESVHGAGHREIRAADLTLDKFIDADTLRAAPALSTFTGTPHTVLLTGANGYLGRFLALEWLERLDKIGGTLIVIVRGKNAEAAYRRLEEAFDSGDAGLLAHFRSLARQHLEVLPGDIGDPDLGLDADTWQRLAETVDVIVHPAALVNHVLPYSQLFGPNVVGTAEIIKLALTTKIKPITYLSTVAVAISVDPKVFDEDSDIRTISAVRPINDGYANGYGNAKWAGEVLLREAHDLCGLPVAVFRSDMILAHRRYTGQLNVPDQFTRLILSLIATGVAPGSFYQAHATGERPLAHYDGLPADFTASAITALGPIEGFHTYDSVNPHADGISLDNFVDWLIEAGYPIARIDNYTEWFTRFDTAIRGLPEKQKQHSLLPLLHAYRHPQHPHNGAFLPAIRFSEGVQAHLNADIPHLTRELIAKYAADLKQLGLL

SEQ ID NO: 194 - protein, 1188 aa, Artificial Sequence
  Mycobacterium colombiense
MTETVTDSAREQRIAERVEQLYANDPQFRAAASLPEVTDAAHRPGLRLAEVVDTYLSGYADRPALGQRACEVVRDASTDRAATTLLSGFETITYRELGDRVAALAAAWQSGLAGGFSPGDFVGVLGFTSIDYVVHYLACIRLGAVFVPLQTSSTAAQLGPIVAETAPRVLAVSVESLTTAVDVVAGAPSVERLVVFDYTSDDDEQRGHYDDARARLRDAGHRAEVVSLSTELDSGGRLAAPPVFAPKDGENPLATLIYTSGSTGAPKGAMYTADMMTRIWRRPHSPSVDIGRPIPAIHLQYMPLSHVYGLEWLIATLSSGGIGYFAAKSDMSTLFDDIGLVRPTALNLVPRVCDMFFRRYRKELDERSGDELTGDQLDDAVKAELRQDFIGGRVISAMCGSAPLSKQMHAFMESLLDIPVADGYGATETGGGIMRSGRIRRPPVTDYKLVDVPELGYFTTDKPYPRGELHLKASNVIPGYFKHPELSAKIFDDEGFYRTGDIMAELGPDHLMYLDRSNNVIKLSQGEFVAVSQLEATFSTSPYIRQIFLYGSSEQPFLLAVIVPNSDAVGDGDARALIADSLQRIAADNHLQPYEIPRDFLLESQRFTRDNGLLSGVGKLLRPALKAHYGDRLDAMYDDIEASHGNQLDELRAASTELPTIDTVRRAAAATLGLPADTALRADAKFIELGGDSLSAFSFATLLSEIFHIDVPVQTIVSPTADLTTVANFVDGERTSVSTRPTFASVHGRGAAVARAADLTLDNFIDAETLAAAPRLPAATGTINTVLLTGANGYLGRFLCLDWLERLAPGGGTVICLARGADPTAGRQRIEAAIDSGDAELSDRFRRLADKHLRVLVGDVGAPNLGLNTPTYQRLAESVDLVVHSAALVNHVLPYSQLFGPNVVGTAEIVKLAITKRLKPINYISTVAVTALPDGSFIGEDVDVRSASPARSLDESYASGYATSKWAGEVLLREAHDLCGVPVAVFRSDMILAHSNFAGQLNVPDMFTRLILSLVATGIAPRSFYQLDASGNPQRAHYDGLPADFTAEAITTLGARARQGYHTYNVLNTHDDGVSLDTFVDWLIADGHRIERIDDYRQWLARFTEAMEALPEKQRKSSLLPLMNAYAKPGEPTHGTGMPAEKFRAAVQSAGIGADKDVPHVTEPLIDKYVTDLQRLGLLRTRTGAHAG

SEQ ID NO: 195 - protein, 1129 aa, Artificial Sequence
  Williamsia sterculiae
MVPGSLLPASAIDTAGADPAVVERVSAETSVSGIVSVLADGYGDRAAMAWRPGNARAWRTLTYAQLASRVDAVATSLVTRFGLGQGDTVAILGFTSPGYSIVDLAVTGPAGGVSVPLQTGASPSSWQQILEETAPRVLAVAAEHLPAVTGILAAMRRTTVEHLLIFDTEDVDVDDLDRRRREIEGTVAQLTTTLHDDLTHDVVAPVRRDRDPDALALLIYTSGSTGTPKGAMYRQSAVARMLRNGFGLAFSRDDPLRWVTLNFMPMSHVMGRTTLLQTLGNGGTAFFTAQSDLSQLLDDLAEVHPTQLQFVPRVWEMLYREYLADRARGADDATALSDLRTRYLGAGEVRAVTGSAPISPDVATFVGDLLGEPLIEGYGSTESGGVLLNGHITRPPVIAYRLRDVPELGYRSTDRPHPRGELLVKTTDIFAGYYRRPELTAEAFDEDGFYRTGDIVAEIAPDELRYLDRRNNVIKLSQGEFVTVSHAEAALVAPPVEQIYVYGNSSRPYLLAVVVPTAGAVVDAGGDDDILRARVNTALRDIGRDAGLSAVEIPREVIIERDPFSQHNGLLTNTAKLARPALKARYGNALEALYGELEAGRDDKLRLAREQASERPAEQTVIDVATALLDLAEGDIGPQSHFTDLGGDSLTAVTLGTELREIFDVEVPVGVITSPTTDMSGLAAFVAAPGGQRPTAASIHGDGETIRATDLTLDAFLDPSTIARASDLPPAPGEPRTVLVTGATGFLGRYLALDWLRRMDMSGGTVICLVRASDADAGRIRLDDAFDTGDDELLAEYHRLAGRHLRVVVADKSARHLGLDDDTWQELAETVDLIVDPAALVNHVLPYHELFGPNVVGTAELIELALTECVKPYVYVSTVGVATQIAPAEFVEDADIREISATRRLDHGYASGYGNSKWAGEVLLREAHEHLSLPVTVFRCDMILADDHDLGQLNLPDMFTRLLMSVLATGLAPRSFHELGPDGSPIPSHYDALPVDFLAAAINALVDDDGFSTYHAMNPHEDGVGLDRYVDWLIDDGAEITRVDDYDEWFTRFGEAITNLPDTQRRHSLLPLLDNYARPTSAVIGGIAPADRFRDAVRRAKVGRHKDIPHITPGIIANYARGLRHLGLT

SEQ ID NO: 196 - protein, 1194 aa, Artificial Sequence
  Mycobacteroides chelonae
MTVTNETDPQLEQLARRIENLRESDPQFRATAPDRAVAEQVLRPGLHLSEAIATLMTGYAERPALGERARELATDHEGRSVLRLLPRFDTTTYGELWSRTTSVAAYWHHDAAHSVNSGDLVATLGFTSVDYTVLDLAIMILGGVAVPLQTSAPASQWTTILAETEPNTLAVSVELIGTALESVLATPSVKQVVVFDYTPEVDAQREAFDAASAQLAGTGITIETLDAVIARGAQLPAAPLYAPSDGDDPLALLIYTSGSTGAPKGAMHSENIVRRWWIREDVMAGTENLPMIGLNFMPMSHIMGRGTLTSTLSTGGLGYFAASSDMSTLFEDMELIRPTALALVPRVCDMVFQRFQTEVDRRLASGHAADSDAVAAEVKAEIRDNLFGGRVLAVMVGSAPLSEELGEFIESCFELHLTDGYGSTEAGMVFRDGVVQRPPVIEYKLVDVPELGYFSTDQPHPRGELLLKTDGMFLGYYKRPEVTAGVFDEDGFYMTGDIVSELTHDNIQIVDRRNNVLKLSQGEFVAVATLEAEYANSPVVHQIYVYGSSERSYLLAVVVPTPEAVAAAKGDTAALKVTIADSLQDIAREIQLQSYEIPRDFIVEPQPFTQGNGLLTGIAKLARPNLKSHYGDRLEQMYADIAEQQSLEMHRLRSDYDPDKPALETVLKAAQALLGVSSAELAVLPSDAHFTDLGGDSLSALSFSDLLRDIFAVEVPVGVIVSAANDLSGIAKFVDEQRHSGGNRPTAETVHGAGHTEIRAADLTLDKFIDEATLQAAPSLPRAVGVPQTVLLTGSNGYLGHYLALEWLERLDKTEGKLIVIVRGKDADAAYRRLEEAFDTGDTELLAHFRTLAEKHLEVLAGDIGDPNLGLEADTWQRLADTVDVIVHPAALVNHVLPYKQLFGPNVVGTGEIIKLALTTKIKPITYLSTVAVAAYVDPATFDEESDIRLISAVRPVDELYANGYGNSKWAGEVLLREAHDLCGLPVAVFRSDMILAHSHYTGQLNVPDQFTRLILSVIATGIAPGSFYQAQATAERPRAHYDGLPGDFTAEAITTLGTQVPEGPDATDAYVTYDCVNPHSDGVSLDNFVDWLIDAGYPIQRIDNYNEWFDRFDTAIRGLPEKQKQHSLLPLLHAFEQPSGAEDHGVVPAKRFQHAVQAAGIGPVGQDGTTDIPHLSRQLIVKYAKDLEQLGLL

SEQ ID NO: 197 - protein, 1167 aa, Artificial Sequence
  Mycobacterium sp. AT1
MATDAVSDTKSRIDDLRNTDAQFADAFPLPAVVEAVSKPGLPVSKMLATVMEGYADRPAAGQRVRTPVTDDATGRTTFELRSEFETVTYGQLWARASALAAQWHHDSTDPLVSGDVVALLGFTGIDYTTAELACIHSGAVSVPLQTSASVSQRAAIVDETLPKILAVGIDYLAGAVDVVLEAATPPARVVVFDYDARIDDQRDGFDEAARRLAEAQSPVRLETFESVVRQGVEQPAAPLFVPEEGENPLATLTYTSGSTGTPKGVMGSERTFRGMWLGQSPIPSITLSYLPMSHSYGRSQVFSSLANGGTVYFTARSDMSTLLADFTLVRPTMVSLVPRICEIVFQRYLSDVDRYAGNESDPAAIEAEVKTRLREEVLGGRVLSAFCGSAPLPKETEAFMESTLGVHLTIGYGASEIGSVLIDSQVQRPPVIDYKLVDVPELGYFNTDKPHPRGELLVKTEQFMDGYYKRPELSAEMLDEDGYYKTSDIMAEIGPDQLVFVDRRNNVVKLAQGEFVAVSRLESLYTMSPQIAQIYVYGSGERSYLLAVVVPSDDLITQLTDDENADRVQSVISRALQRIAADNGLNGYEVPRKVIIETEPFSQENGLLTGIGKLQRPNLKARYGDRLESVYSELADDQVNETKALRTGGADRPVIETVTRAVQALLGLSAADVDADSRFGDLGGDSLSALSFSNLLEDIYGIEVPVGVIINPASDLTRLAEYIETQRSSGVTQTTFASVHGAGSTEVYARDITLDEFIDADTLTTARSLPAPDGTTDTVLLTGSTGFLGSRLTLEWLQRQADCGGTLICIARGSDAAQARERIESALDSDPELIDTFRALASENLEVLAGDLGEPRLGLDEATWNRLAHTVDLIVHPAAHVNHVLPYNQLFNANVVGTAELIRLALTVKLKPINYVSSMGVTTLHNEVIAEDADIREAVSVAKLDDGYGNGYALTKWAGEVLMREVNDWCGLPVAVFRSGMILADRKYAGLLNVPDIFTRLLLTVVSTGIAPETFYAANGADGRPRANYSGLTVDFLAESIADLGVDMTEGTFRTYNTDGGYDDGISLDTIVDWVIEAGFPIQRVDEYDEWVTRCETAMRGLSEQQRQHSLINVMDAYRHPQQVAAGSAVPSGRFQAALHAVGLEPPHMSKTLIDKYINDLKLLHLV

SEQ ID NO: 198 - protein, 1159 aa, Artificial Sequence
  Brevibacterium casei
MNLKGKTPMLLNTQMTSIFERFSGRPALADRRPIPRSNGDRDLFDSEVLDWYETLSYEELRRRVLAAAAQLHGRRMVKGPLASGDRLALLGFPGIDFTTIDFACNLAGVTTVPLQTSGSLEQHRSIIGETSPRALVISISLLNKAESILSHADSIDRLIVLDYRGGDLSHRRILESAANSLPIAPELLELDPDPGDAFGDICDDHLSMLLYTSGSTGAPKGAMYSARLVREMWGGEGWSEFFAEQDEIASFHYMPMSHVAGHSSVRSTLSRGGVTYFSSTPNLANFFDDLALARPTELSLVPRVCELLHQEYQRRAESRRDDTDGYASQAVLEDMRTSVLGGRVEWASCTSAPVSAELKAFMERLLGIELHELYGTTEIGGVLADGRFLTPPVIDYRLDDVPELGYFRTDRPSARGELLVKSTSTVPGYFNRPDLNAEIFTEDGYYRTGDIAAVDSNGTVRIIDRKNSIIKLSQGEFVALPSLEATFVAGSTLIRQVFLYGRSDWSALVAVVVPTDLAQSAAADDERNQTMAKLMLDELRHVAEREHLNSYEVPAAVIVESEPFSEENGLLSDHRKPVRPRLHDKYQSQLEAIYEQIVAARDDALTDLIAHGAENDTASTIRDAAALTLQIEPATVSIDAKFRNLGGDSLTAVHLSRLLNQIYGLHIPVDVLVSEARTFADLGEYMDGKRGQREWLATFEEIHTSDMRPLYAEELTVERFLSSRATINPSSTRYGAPQGVLITGASGFLGRFLCLEWLRRFAGTTRRVTCLVRANSHAAARARLRATYSSSPELLAEFDRLAGNLDVVAGDLAEPRLGLDEQIWKSLSQDITHIIHAGAMVNHALGYRELFASNVAGTAEVLHLALTGPLKRITFMSSIATALLQQAGGPMTERVDIREALSQIEDAGGIVDGYAATKWASEVLLRNANEQFGVPVTVFRSSMILAHSRYRGQINVPDTYTRLLFSVLQSGITPSSFYAANGEHAHYDGLPVDVVSEAIASLAQDETREYRTYHLVNPFDDGISLDRFVEWLIEAGVSLVRVGEYGLWMERFKMALSVLDDDDKRASLLPLIDGFRAPEDPVRGSRIDSTDLHGALAQAGLADRLQPLSGSSDIRWGSWGESAGGEEHAEPVVVPVAVAAGEAAVELDDPVHGLGATVR

SEQ ID NO: 199 - protein, 1174 aa, Artificial Sequence
  Mycobacterium noviomagense
MSTDGRAEWLARRVEELSATDPQFAAAQPSSSVATALEQAGLRLPQVIRTVLQGYADRPALGQRVVQFVEDSKTGRTVLELLPRFETITYRVLGERVDALARALTEDLVQVGDRVCVLGFTSVDYTTIDVALGLIGAVSVPLQTSAPITQLQSIVAETEPSVIAASVEYLPDAAELACSGPAPAKLVVFDYRPEVDDQCETVEAVRERLANTAVLVETLADVLKRGKALPAKPGGAPNSSDDDPLALLIYTSGSTGEPKGAMYPQSHVAKMWRRRTSSTNWFGFRAGAASITLNFLPMSHALGRGTLYGTLGNGGTAYFAARSDLSTLLEDLRLVRPTELTFVPRIWEMLYGEYVSEVDRRVAEGADRETVEAQVLREVRQEVLGGRYVFAMTGSAPISKELKAWVESLLETPLTDGYASTESGMILRDGQVQRPPVIDYKLVDVPELGYFSTDRPYPRGELLVKTENMFPGYYKRPDITASVFDADGYYRTGDVFAQVGRDRLVYVDRRNNVIKLAQGEFVTLAKLEAVFDTSPLVHQIYVYGNSAHRYLLAVVVPTRDALARFDDPSTLRARIADSLQEVAKTAGLQSYEVPRDFLIETTPFSVENGLLTGIGKLAWPKLKERYGERLEQLYAELDQGQANELAELRRSGADRPVLQTISRAAAALLGTARVEVSPDAHFTDLGGDSLAALTFANLLREIFGVDVPVGVIVSPATDLQAIADYIQAERQGVKRPTFVAVHGRSATKVHAGDLTLDTFLDGATLSAATNLPKPTTEVRTVLLTGATGFLGRYLALEWLERMDLVDGTVTALVRAKSDEEARARLDKTFDSGDPRLLARYQELAAEHLEVIAGDKGEPNVGLDRQTWQRLADTVDVIADPAALVNHVLPYSELFGPNTLGTAELIRLALTTKLKPYTYVSTIGVGDQVEPAKFTEDADIRKISPTREINDSYANGYGISKWAGEVLLREAHDLCGLPVTVFRCSMIMADTTYKGQLNLPDMFTRLMLSLAATGIAPFSFYELDADGNRQRAHYDGLPVEFIAEAIATLGAQNVETFQTYHVMNPHDDGIGLDEFVDWLIDAGYPLQRIGDYAEWLHRFETVLRGLPDRQRQYSLLPLLHNYQKPQTPLRGSMAPTDRFRAAVQEAKIGPAKDIPHISPAIIVKYVTDLQLLGLL

SEQ ID NO: 200 - protein, 1118 aa, Artificial Sequence
  Mycolicibacterium peregrinum
MYAADRQFRSCVPLPEVSAAVREDGLGLAGIIAAVMTGYADRPALGRCAGSAPHTISYRDLWQRINAIATDWLAHQTFPISSGEFVCTLGFASADYITVDLACALTGAVTVPVQYGAQTGQLTRVLAETRASALAVSSDQLPTAVEAALSAPRLRRLIVFDHRADIDDFGDTFEQAQLRLTKSRHPILFETLDEVIRRGLRRPPAASPRPPLPPADPDRLVGLSYTSGSTGTPKAAMYTERMVAGTWRNSVAIPVISYNYMPMSHYGGKALVLTTLASGGTAYFAAAPDMSSLFDDIAAVRPTVLPLIPRVCEMIYSRYQSECSQRSAPTSDPATVRAQVMTHLRENVLGGRMLLAASGSAPLSAELTTFIETCLRIHLAIGYGTTETGNVLNDGRVVRPPVIDYKLVDIPELGYFGTDRPYPRGELLVKSEVLTPGYYHRPDATDTAFDDEGYYRTGDVMAEIGPDHLAFVDRRSNVVKLSQGEFVALSHLESVFVTSPYIRQIFVYGSSRRAFVLAVVVPETPPGLPAATKATILASLRTIARDNALRPYEVPRDILIDPRPFSVDNGLLTATAKPARPALTIHYREQLEQTYADIADRQAVELATLRQGAADRPVLETVRLAAAATLGITTVDVDTVLSDIGIDSLTALTLATLLTEIFGARVPATAVIDPTRNLSGIASLIEAQRRAIPRRACPGVHGQCTDRVYARDLTLDRFIEARTIDRDRPVAPNPGPPRTVLLTGANGFLGQLLCAEWLRRLAPIGGTVICLVRGADNADAHRRLKAEFGPPAESRLEVLAGDLTDEHLGLDGATWSRLAATVDLIGHSGALVNHLLPYPELFGPNVVGTAGLIRLAITGKSKRFAFVSTAAAGTTDDGRPLPEDADVRVGCPARTRNTAPANGYVISKWAAEVLLRRAHDAHGLSVTVFRPGMILAHSRFSDHLNVGDVFTRLVLSLAATGIAPPSFYRQPANRPHYDGLPVDFVAAAIVELAAGPGPFGGFATYNVVNDHDDAISLDEIVDWLVEAGHPITRLQSHREWAARFETAMRALPVRQRRHCLLPLMAAFAEPAEAVAGSAFPTQRFRECLRSSGAPRPVPHLTPDLIHGYLTALRHRGLL

SEQ ID NO: 201 - protein, 1174 aa, Artificial Sequence
  Pseudonocardia sp. SCN 73-27
MTLDPRALPAYARRVLDLAETDPQLRELMPDGAVEEALGRPDLSFEQALATVLDTYAERPALGERGYDIALGDSGRHVRAWNPWFRTITYGELHGQITGLASSWRHQPRHRVDPGDFVCVLGTTSIDFVTIDLACAFAHAVSVPLQGTMGAANLDRILHDTTPTTVAATVAELSLAAELVAAHPSVRSLVVIDSDERVDDEREAIEAAAETLGRSRSSAALVMLAELVARGAAEPWTPLPPAPEGNDRLALLVHSSGSTGTPKGAVLTERLARAPFSRAPVPVPVVRLCFAPMAHTAGRGSPYGALAHGGTAFFTARPDLSMLFEDMRLVRPTESFAFPRILEMVHRAFQGDVTRRVNSGIDPAKASADVMAEMRDTFLGDRISLLTVGGAPTPPALARFTAECLPVEISDRYGSTEVGQVTENGRIMRPPIIDYRLRDVPELGYHTTDEPYPRGELCLRTATAISGYFNRPDATAALFDEDGYLLTGDIMEERGPDHLVYVDRRHDVLKLSQGEFVAAGALRTAFEDGSDVIHQIYLYGTSVRSYLVAVVVPDAEAVRRVLGERPRDGALKELIRAELNEVGATAGLKAFEIPRDFLVEPEPFTHENDLLTSLHKPRRPNLERKYGGRLEALYDELERRQRDELDALRGGGDSLDVLEKIGRALEASLGLEHVDVHRPYGFTELGGDSLGAVAFSELLEDLFGVEVPVTTILSPAGNPVRWARAVEAALRHEGSPATFSAVHGRGTRELRAADLGLDAFLDADALRDTPGSEPPTAPRTVLLTGATGFLGRFLCLEWLEELAATGGTLVALVRAADEPAARSRLDAAFASDPALLERFRALARDRLRILPGDVAEPRLGLTARDHDRLADEVDRIVHPAALVNHVLGYESLFGPNVAGTAQLIGLALHRRQKRIDFVSSAAVRPFLDRSAGPQDEWPLSPQIVLTGRYGSGYGASKWAAELLLHDAHRRFGLPVDIHRGSMMLPHRHYRGQINPDDVFTRLLHSVITTGLAPRSFYFPGPDGSRARAHYDGLPVDFVAAAIVRLGAQAHRDVRTLHVSNFHVDDGYSLDMFVDWIEQAGYPIRRIDDHGEWLRLFEERLRALPEDERNRSSLAVLDSLRRPDDPSGRAARGTRFREALDAVPGGGLAPPHLTREFLGKCLDDMRRLGLLPAPA

SEQ ID NO: 202 - protein, 1186 aa, Artificial Sequence
  Chloroflexi bacterium HGW-Chloroflexi-5
MTDSNTNPSPKKRYFLRMQELAQRDPQIKQLMPSESVRDAIFQPGLSYDRLIQTVLEGYAEHPALGERDYAIARDEATGQNLRKLLPSFSTITYAELHNRVQGLANAWRCNPQNRVAPGDFVCIFGSTSIDYVAVDLACVYAHAVSVPLQTTLAEADLMRILAYSNPAALVAGPGDLSIVARLAVEHGSIPALVVMEYDERDDRERAQFEAAKAKLDSAGVLTQIVTIKALIEDGQSTTWEFLLPGPEGAERTVMLLHSSGSTGTPKGAIYPERAAKALWLTTRNQLPMVGVSYAPLNHLVGRTTISNVLSAGGTAYVTAKADLSTLFEDIRLVRPTYLNLIPRICDLVYQHYQNEVLRRTKAGEGDKESVGQRVKAQMRSTFLGDRFLGAVISSAPTSPAVKEFMRDCFDILFQDFYGTTESVAGLFLDGRVLRPRVKDYRLRDVPELGYSVQDKPYPRGEFCFKSDYCIKGYYQMPEASAALFDEDGYQCTGDIVEERAFDHVVIIDRRNDVQKLSHGEYVAVGPLGTVFESGSAVIKQIYLYGNSLRAYLLAVVVPNREVVTSLLGDNPGEAQLRALIRRELQTVGHNAKLRGFEVPRDFIIDWEPFSIENGLLSSVLKRKRPNLKRKYGEQLEALYEKLEQKQKQDLEALKDPTSSLTVLEKICALLAANLGLQETDIDPRRTYKELGGDSLGAVTFSIMMEEIFDVLIPADAILSPIGSPAAWAEAITSAQNPAGVRSPGFADIHGKGAKKISGKDLTLERFLGQSALRNAATESAGAVKTVLLTGANGYLSRFLTLEYLQKLANKGGKLICLVWARDNDDAKRQLDAVFAGADPEMEARYRNLAEKHLDVLAGDISAPLCGLKQEAFEQLASRVDRIVHAAALVNHALAYEHFFGSNVVGTAEMIRLAVSKRKKPIDFFSTVAVRPFLKLTKGQCDTEQSPIKDSIVLAPGYAAGYGASKWAGEHLLGDAHRRFGLPVNIFRCDMMLAHQKYVGQINKTDMFTRLVYSLIVTGIAPGSFYLPQSDGSRSKAHYDGVPVDVVASVVAGVSDDTASALKVFNVRNYHDSDGVSLDSFADWIRSAGYPLEQVHNYKDWVTRFEQMLKNLPDDQRQNSFLDLMGAVRDPWPPKMLVQDSSQFQELVQRLPIGDMPHLSEVYVHKCLDDMRRLGLIPAPVHASLL

SEQ ID NO: 203 - protein, 1164 aa, Artificial Sequence
  Mycolicibacterium tusciae
MSTDTREERLARRIADLTAADPQFAAAKPDPAVSQAIENPELSLDAVVRTVLTAYADRPALGERAVDYVEDRRGRTSAKLLPHYNTITYHELDDRISSLTRALTDVHPGDRVAILGFGSIDYTVIDVATIPLGAIAVPLQTSAPLTALRPIVIETEPAVIASSIDYVDDAAELVLTGYAPSSLVVFDYDPEITDHRDAYDALRARLADAESTVVVETLQDALERGKTLPAKPAAHREADDMALLIYTSGSTGAPKGAIYTRNMTGKLWRPASWGWADSVEPSIVLSFMPMSHVMGRSGLFGALSHGGTAYFAAKSDLSTFLDDLALVRPTQLSFVPRVWDMLSAEVHSRLDRHAFEGTDTKSDAEFLADVRAAVIGNRYLTAVTGSAPTSSDLKAWVESFLDLDLLDGYGSTEAGGVLLNGQIKRPPVIEYKLADVPDLGYFSTDRPHPRGELLLKTVNMFPGYYKRPEVTAEVFDEEGFYRTGDVVAELGPDRLQYVDRRNFVLKLSQGEFVTASKLEAVFETSPLVRQIYIYGNSARSYLLAVIVPTPEALSQHDTSELRALISESLADVAKGADLQSFEVPRDFILETTAFTLENGLLTGIRKLARPKLKEIYGPQLEELYEDLAQGQAAELRELRQDGATCPVIETVTRAAAALLGSAAADLSPDAHFTDLGGDSLSALTFANLLREIFFVEVPVGVIVSPATDLAALAEYIETERSGSTRPTFASVHGRGATEIHARDLMLGKFLDAHTLANAPALPYPSQEVRTVLLTGATGFLGRYLALDWLERMSLVGGRVITLVRAKDDATARQRLDETFDSGDPALLDHYRRLAAGHLEVLAGDKGEPGLGLDETTWQRLADSVDLIVDPAALVNHVLPYDQLFGPNVVGTAELVRLALTTKLKPFVYLSTVGVGDQIEPSAFVEDADVRQISATRVVNDSYANGYGNSKWAGEVLLREAHDLSGLPVEVFRCDMILAEPEYAGQLNVPDMFTRLMLSLVATGIAPGSFYELDAAGHRQRAHYDGLPVDFIADAISTLGAHHSYGFETFHVMNPHDDGVGLDEFVDWLVDAGYPIDRVADYGEWLQRFEMSMRGLPDRQRQASLLPLLHSYAQPAKPLLGSVATTDRFRAAVQDAKIGPDKDIPHITAEIIVKYITDLQLLGLL

SEQ ID NO: 204 - protein, 1181 aa, Artificial Sequence
  Mycolicibacterium goodii
MQDRLNRRIAHLYATDPQFAAALPDADTVATIRTRELRLNEFFETVVAAYGDRPALGTRARASDPENDIGTCLAPRFRTLSFRETWARVSAVATALRRGDEPPLQPGDVVVIIGFSSADHLVVELACAYLGLVAVPLAHNATAAQLRPIIDEVEPRVVAVGAGHIRLAVDATIDAPSVRQVVVFDGGDDDAGQEVAALGYGHRTVRFHTLDGLAETGRRVPAELPYMGGSPQRLAMILYTSGSTGAPKGAMYTEAMVTKLWCSGLVPVEVPVFNLNFQPLNHGAGRLPLIAAFQAGGTSYFVAEPDLSTLFEDWASVRPTQLPLVPRVVDMLYQRYRASVDRASTCGSSLCAAEAAAAAELRDDVLGGRVLNAFVGTAPLGEPMKRFLDTVLDIHVIDAYGTSEAGVIAKDGVIMRPPVLDYKIIDVPELGYRRSDKPFPRGELAVRTVSATPGYFKRPDLTSMIFDSEGYCRTGDVVAEIAPDHISIIDRRNNVIKLSQGEFVAIERLETLYATAPLVRQIFLHGNGDRPRLLAVVVPTGEAIAAARDPGGLKRVLLESLQRTAEEHGLRSFEIPVDIIVENTPFSADDGLLSSGGKLLRPRLIERFGERLEQMFDDLAVAQVTAIRQLRTVAAAGRTVEAVVHAARVVLGADQVDSHVPFVALGGDSLSALTFSDVLRQMYGFEVPVSMIISPAGDLSQLADFIDGRRGSGARVSTGAVHGEDVTELRAADLKLDKFIDRQALVDAVSLPRPTGVPNTVLVTGANGWLGRFLTLELLRRAARRGGTVIAMARARTADAARARLIQAFDRGDDDLMREFTTLAADHLGVVAGDLTAPLLGLHPVVWSRLTRTVDSIVHTAALVNHLLPYGELFGPNVAGTAEVIRMAITNKLKSVSYVSSMAIIGEGEPSMLNEAGDIRSLNPVRINTADGPGTYALGYANSKWAGEILLREAHDLCKLPVAVFRSDMVMAHRRFSGQINRDDLVTRLILSLVVTGIAPRSFYDKTCVNARFDGLPVDFVARAIAAISQDGAAGFRTFNVSSPHDDGVSLDVFIDWLEAAGHAITRVDDHDEWLRRFEDTLKALPTDLRNRSVLPLIDAYRRPIRSTRGIARAFQQAAREHGVGEIPRLSSTLIDKYVADLSVAVGVKVRSASLCPAQSSSSDSTSSGVTSRVAIPPSRP

SEQ ID NO: 205 - protein, 1171 aa, Artificial Sequence
  Frankia sp. EUN1h
MSVTDVRRPADRLAELVETDDELRALTPDPKVTAAARRPGLSYRQIVETVLDGYAERAALGQRRYEIVQDGAGRARRVDQPGFDTITYGELHRRIRCLAAVWKHDPLYRVEPGDLVCILGFASTDYVTVDLAAAYQLAVSVPLQATLAATDLRGTIADTAPTAVAAEMVDLHLAATLAGTQESIRTIIALSYDARVDEDRERLAAARDELARNRSRARLVTLDELLVAGAGLPAWEPPPASAAGTRRMTLLIHSSGSTGTPKGVIVTEGTVAAQWDPGERPGPVVRVALAPLNHMAGRHMIYSALARGGRANITARSDLSTVFEDIRLTRPTEMSAFPRILDLIHQHFLSEVVRRTSAGADAATARAEAMRLVRTEFLGDRVCMIGGAGAPVTPQVQSFIEECFQVRLGGGYGSTEAGTMAVMGRVLRPPVIDYRLRDVPDLGYFLTDKPYPRGEFCVKSERATPGYFKRPEATAALFDADGFLRTGDIVEERGPDQIEWIGRRNDVLKLAQSEFVAVGGLATTFENGSELIDQIFVYGNSARSYVLAVVVPNPDVVRDRLGDRPTETSVRSLIRSALRDVAAREDLRSFEVPRDFIVEHEPFTHENGLLSSVHKRMRPALEARYRDRLEQLYTDLELRRTENLTALRELDGGSVLDKVARALEVALGVEDIDRSAPLGFLDLGGDSLGAAAFSTVLAGIFGVEVPVNAILSPTGNPRTWTRLIESALDQSSERLTTFERVHGKGARLLRAADLDIRAFLDADVLRQPPSEPPPAVSNCVLLTGATGFLGRFLCLEWLERLEATGGRLICLVRATDEAAALRRLTAVFDTDPDLRQRFAALSEGRLEVVVGDVAEPGLGLSVADFDRLARQVDRVVHPGALVNHVLPYEDLFGPNVAGTAELVRLALTHRQKRFDFVSSAATTHLLDRGAPRHEDSPLLAEIDLDSHRMGYGASKWAAEQVLLSAHRATGLPVNVFRGDMMLAHRTYHGQINVPDVFTRLLTSIVLAGVAPASFYPPTETGAPARAHYDGLPVDFVAATIVGISTQPHDGARNYHVLNHHADDGISLDTFVGWIAEAGYPIERVPDYATWFARFETKLKALPEAKRQHSSLTVLGTMSRPRPVEPMVDTTRFQAAVRDLPVGPRIPHLTREFIHKCLDDMIRMGLVPPPPA

SEQ ID NO: 206 - protein, 1168 aa, Artificial Sequence
  Mycobacterium sp. JS623
MSTVSREERLARRISDLYATDQQFADARPSEAVAHAIESPALRLPQIIQTVIDGYAERPALGQRAVEFVTDPTTGRTSAALLPRFDTITYRELSERVDAVATALTQNPVRPGDRVAILGFTSIDYTTVDMALLRAGAVSVPLQTSAPVAQLRPIAAETEPVAILSSVDFLDDAVELMLTGHLPERLVVFDYHAEVDDHREALASATARLAETPVVVETLAEVLARGNALPAHPAFDAGDDNLALLIYTSGSTGTPKGAMYLAKAVANSWRRSSMAMWGNEGATPSITLNFMPMSHMMGRGILYATLGAGGTAYFVARSDLSTFFDDLSLVRPTQLSFVPRIWDMVFAEYQSEVDRRSADGGDRWAVEADVLADLRQNLLGGRFISAMTGSAPISSEMRTFVESLLDIHLTDGYGSTEAGAVFVDGQVQRPPVIDYKLVDVPDLGYFSTDRPYPRGELLVKSETMFPGYYKRPEITADVFDADGYYRTGDVVAELGPDQLQYLDRRNNVLKLSQGEFVTVAKLEAVFVDSPLIRQIFVYGNSARSYLLAVIVPTEEALARHDAAELKQLITESLQDVAKATGLQSYEIPRDFIIETTPFTLENGLLTGIRKLARPKLKEFYGERLEQLYTDLADSQANELRELRQHGADRPVLETISRAAGALLGAAASELQPDAHFTDLGGDSLSALTFANLLHEIFEIDVPVGVIVSPANDLAALAAYIEAERQPGSKRPTFASVHGRDATEVYANDLTLDKFIDAKTLAAASSLPGPSSEVRTVLLTGATGFLGRYLALEWLERMDMVDGKVIALVRAKDDDAARERLDKTFDSGDPELLRHYHELAADHLEVIAGDKGEANLGLDQQTWQRLADTVDLIVDPAALVNHVLPYSQLFGPNALGTAELIRIALTTKQKPFVYVSTIGVGAGIEPGQFTEDGDVRVYSATRKVDDTYANGYGNSKWAGEVLLREAHDLGLPVSVFRCDMILADTTYAGQLNLPDMFTRLMLSLVATGIAPDSFYEVDANGNRQRAHYDGLPVEFIAEAISTLGAQVVDGFETYHVMNPYDDGIGLDEYVDWLIEAGFPVERVGDYTTWLQRFDTAVRALPERQRQASLLPLLHNYQRPETPIRGSIAPTDRFRAAVQDAKIGPDKDIPHVTRDVIVKYITDLQLLGLL

SEQ ID NO: 207 - protein, 1155 aa, Artificial Sequence
  Legionella moravica
MEISLSCIELIEQYCLKYGDKPALGYRKTEITNQNQNQTIHYLPEFETLTFRQVWDRISYIAKGFNYSNRVSPNDFVGICAFGSPEYILAEFSCLYLGAVSVPLQFNIKEPELIKIVTDTKMRCLITGLQQLKLACNAVPHCPSIQSIIVLDCHEEDKDHSIQIRTLRADFANQNIQCELLTLADLERGGQHTVIVKPFIPQNNANHLATLVYTSGSTGLPKGAMITEQSWRELWTKTGFYKHTPDIPLIVFNFMPLSHMFGRMIVINSLMQGGTTYFASKSDMSTFFEEIRLVRPTVLYLVPRVSELIYQNIQIAVNNRLQASNPSPRTEIENEILSEMKNTILGDRLSIAITASAPTPPEIMYFLKRLFDVPVIDVYGSTELGIILINNQTSPQNVIAYKLVSRPELDFFTTDKPYPRGELYMKTHRAVIGYYQNPDATADLFDAEGYLKTGDVVEERAPNNLFLIDRINNIIKLGNGEFVSLLRLEQIFLGGSRLIKQLFLYGSSLRSYLLAVLVPDISLLKEKLIELGLPENPVQMKKILLQEIHAIAKLEQIRSYEVPLDFIMELEPFSQENQLITESNKLARNNLKKKYGHSLEELYEHIEKNQLADLINLGNSDSSIENLVCVVLGSQNIEWGNSSFIDLGGDSLDAVRLMNTIKDIYSVSVPVSLILNPAYSIKNLINNVNEKRHGKTERCRTHAIIFSDIHPINASKSEKMKLFASDLHLSAFFSSHEMEQAKKLPKRDKSLPVSNVLLTGANGYLGRFLALALLEKLSLNQGKLICFVRAHNNTHARKRMFESFQHSEFALRERFIQLAQNHLVVYAADLTAPNFGLSDDVYDTLATEVDLVLHNGALVNHALSYEQLFEPNVLGTVEVIRFALQNKLKPIHFVSSVAVTKGLYHRSIILETEDIRKQWPMRYNKTGYAEGYATSKWAGEVLLKNFSEAFDLPVHVFRCGMILAHSTYLGEINADDFFTRLMAGIINTGIAPKTFYEVTHETDFKPCFDGLPVDFIADTIADDALVFGTDYATYCVINPTGNRSINLDVIINWVIEFGYKIDQLEFYEEWYREFLTRLKQLSGIQKRHSPLPIIHKWEHPAEIGHESKLDNSQFYKMIKKHVDSNVPIINQAFIYKCLIDMAMLKIIGLPQAIQS

SEQ ID NO: 208 - protein, 1153 aa, Artificial Sequence
  Pseudomonas sp. 43NM1
MSLAKIVADTMSKYADRPAIGERDKIFITDDSSQEVSLKLLPSYGTITYGELWKRTGALAAELHHSTNAPLTAGSSVAFLAFTSGDYAILDLACIRLGAIVVPLQTGSSQAQIDSILQETEPLVFATSIDYLDIAVEVAIKTPSIRRILLLDYYSQISEHSKKLNAVLSQLDSNSSVISIEPLQDLIKRGTALSEPPMYSSSTSDEELSMLIYTSGSTGTPKGAMYTQKLASGMWGGSWATIFSEERAITFHYMPMSHVAGHSSLKSTLARGGTCYFTAKSNLSTLLEDISLSKPTELSLVPRICEMIYQKYQTELARKRASHGDDTSLTILEDIRVNILGGQVGWASCSSAPLSNELKIFTESLLNIPLHNVYGSTEAGAIWIDNELLSPPVEDYRIIDVPELGYYGTDSPFPRGELLLKTQSIIPGYYKRPELASELFDEHGYYKTGDIVAETGHNRLVYVDRRKNVIKLSQGEFVATAKLETIFSAIPEIQSIFVYGKSEWSYLLAVVVPSKHLAQRFDGKAELIKQFIGDAIRKVAKTSELRSYEIPRDLLIDNEPFTQTNGLLSDHGKPLWPKLREKYASQLEELNIQLVSKELNELHDIHERINQQTVLETLKQAVRSLVGGATEEISSHAQFRELGGDSLSAVSLASILSDAYGITIPVDMLISPAYDLQHVSDYIEKTLHSGQIRPSAASIHGAKPNVFNAKDLSLQKFISPDILEKAQGLKPSSNSARTILLTGSTGYLGRFLCLQLLEEFGETGGKLICVVRGKNVALATKRLYESFGSANSQVSRKLRSLSTLHLEVLAGDIGEPKLGLDPETWDKLGKEVDTIVHAGALVNHVLPYSNLFDANVTGTAEIISLALSNHLKPVVFLSSIAVASLVNTETTLDEDADIRIAAAEIEAEDTYAAGYALSKWASEVLLREAHSHYGLPVTTFRSSMILAHSQYPGQLNVPDMFTRLLLSVALTGIAPPSFYRATNNVGLPHYDGLPVDFTASAILKIGVKQHTESYRSFNLVNPHDDGISLDTFVGWMTDHGVNIRKIADYADWYNRLETALLGLPERLKQHSILPLMHGFSEPAEVISGSTIPSNRFQEAVETFDSGSGAFAIPHISESLIRKYVTDLQSLGLLGDLHKRLNRTSSAAIPELQL

SEQ ID NO: 209 - protein, 1162 aa, Artificial Sequence
  Mycobacterium sp. EPG1
MSTDTQRFERRIADLLAHDTQFAAAAPSPAVTAAIEAPGIRLPDVIQTVLDGYADRPALAQRAVRYTTDPHDGRTTTELLPEFDTMTYGELSRRVHAVADALTEVSPGDRVAVLGFTSVDYAVIDIALPVRGAVAVPLQTAAPVASLKPIIAETEPVVIFSAVDYLDDAVELALGAPWVRRLVVFDLLSRVDAHRERVDAAKRRLQDAGSPISVVTLAELIDSAPAEPAGPPHVSPGPDPLSLLIYTSGSTGAPKGAMYTERLVANAWRPSNRMNWGERGSHPSITLNFMPMSHVMGRMLLYGTLGSGGTAYFAARSDLSTFLEDLALVRPTQLSFVPRIWDTIVAEVTKELDRRPGEREAVFAELRHRMLGGRYLLAMTGSAPLSPELRAFVEEFLDLHLTDGYGSTEAGAVFVDGQVQRPPVLDYKLVDVPDLGYFRTDRPHPRGELLVKSDTLFPGYYKRPEITAEMFDEDGYYRTGDVVAELAPDQLAYLDRRNNVLKLSQGEFVTVSKLEAVFGDSPVIRQIYLYGNSARSYLLAVVVPTEAALAGEDVKSVVAESLQEIAKAADLQSYEIPRDFLIETTPFTLENGLLTGIRKLARPRLKDHYGARLEALYSELADGQEDELRALRRDGARRPTLETVSRAAAALLGTAAGDLRSDAHFTDLGGDSLSALTYANLLHDIFDVDVPVGVIVSPATDLAAVASFIDTERENSSGRATFASVHGRDASEVHARDLTLDKFLDATTLAQAPGIPGPRPEVRTVLLTGATGFLGRYLALEWLQRLALVGGTLICLVRAKDDAAARDRLDRTFDSGDPALTEHYRRLAADHLQVIAGDKGEPDLGLDRDTWQRLADTVDLIVDPAALVNHVLPYSQLFGPNAVGTAELIRVALTTRQKPYVYVSTIGVGAGVAPDRFTEDGDIREISPTRQVDDSYANGYGNSKWAGEVLLREAHDLCGLPVAVFRCDMILADTSYAGQLNVPDMFTRLILSLVATGVAPDSFYQLDPAGHRQRAHYDGLPVEFIAEAISTLGADVADDSPTGFETYHVMNPYDDGIGLDEYVDWLIDSGYPVHRVGDYDTWLQRFTAAINALPERQRQASLLPLLHNYQHPETPLRGSLAPTEHFRKAVQDAKIGPDKDIPHVTRQIIVKYVTDLELLGIL

SEQ ID NO: 210 - protein, 1152 aa, Artificial Sequence
  Aphanothece cf. minutissima CCALA 015
MCSETSSSSRLPTSCPVPFPVTTSAGPASTPSSCPRTFRSSRSTRHRPDAIVVVSESSAVPPSSLAYGALIDFFLAAHPERPALAERAYTVEADPASGATHRRTLAEFRPITYRTLRDRVRSLASAWHADPAAAIRRGERVAILGFASIEYAVIDLALAYVGAVPMPLSGHHSAPEYDAILERATPAALAVSIAQLPAMVDLVRRHGCLRQLIVFDADTRITAERTLLEEAKATLRAAGSTVPLLLLPDLLRRGEGLDVPPPAAVDPEAMALLIHTSGSTGLPKGACISAAALSNTWRQVTGPDPKVAVVLAPFHHMMGRDSMVTALNCGGLACFTLKPDLSTVFEDIRLARPTGLVLFPRLCEWIDQHVRSTKSGDLRFFLGDRLESIVVASAPIAPRIRALLEDTFGVPVHEGYSSTETASGGLAMNGRLNRSNVLDYRLRDVPESGYFRSDRPYPRGELCVKTRFGIRAYFRNPEATAALFDADGFSCTGDVVEERGPGQIAIIDRRRNVIKLSQGEFVAVGALEQLFADGCASVAQIHVHGESSRSYLLAVVVPDREALARRPRPPGSDAALVALVREEMVQLAGEQGLKSFEIPRAVLLAEEPFSHANGLLSSLGKPIRPAIRQRYQEALAALYDSHDRLGDAALATLRQPGAGLSLEQRLRLLLHSTLGVHDDGALEGHCFRDLGGDSLGAVQLSVRIEAEFGVAIEASQILGPDGTIAAWARILRASGSGPGQEHAAGDFATSDRVASDLATSELAAEDFRVEAFIDGATLDAAAVLPAAPWPARSVLLTGANGFLGGRLALAWLERLARTGGRLVCLVRPSHTRSARERLEARFAHLDPTTAARWRTLAADHLEVVAGDISAPRLGLDAATYDRLAHGIEAIGHCAALVNHRLEYRHLRRPNVIGTAEIVRLALTHRRKPIDLISTIGVAPLGERLRLDGSYANGYFASKWACEQLLRSTHATTALPIRILRSGLVLPDRQLAGERNPDDILSRLIHSLLLTGLAPPGFSSNEAGGESVGFHASGLPVDQLAQAIVALGDVAPEGFHLLTLGGPADGWFPLEALVERIEASGFPLQRTASYAEWLERIEPALRRLPAEQRALSLLDVLEAYRPVRRPGAETCAGFPVAYLDKVCSEAVAAAGHG

SEQ ID NO: 211 - protein, 1154 aa, Artificial Sequence
  Rhodococcus sp. AG1013
MPNDPRAILEQRIAALAIADPQVRAAMPSQEVVSALGQPDLSPAQIAEIVLAAYADRPALAHRVGEITTDPRTGRRTRRLLPQFVALSYAEVAARVDAVAAACRATAPLAVAPGDVVCIVGSPGIDFTTLDLACARVGATVVPLHSDVSSDLLAAIVTETEPTMLAVATDELCVAVESLRHSPAPRHLICFDYHAEDDDHRDAIDAARSTFAACGINVVIETLPELLDRGALLPPPPPVAVSLDATAILLYTSGSTGAPKGVIYTAKTAAAMWAAKGEIPSLTVHFMPLSHLAGRNALFSTLAEGGTVHFTGQSDMSTLLEDIALVRPTRLRLVPRVCETLHQRYHGDVTRRIAEGSKRADAEANARVVFRRELLGGRVVWALCGTAPLPTELREFVESVLELKLHDAYGSTEAGAILADGRLMRPPILDYKLADVPELGYFCTDQPYPRGELLLRSQTLTTGYFRRPEATAAAFDEEGYYRTGDIVAEIETDRLQLIDRRSSILKLAHGEFVAVSRLESTFGAAPAIRQIFIYGSSERSYLLAVVVPTDPTRSKLDLLQSIRETARSAGLNAYEIPRDILIEHEPFSVGNGLLSGVGKLLRPMLHRTYSERLEQLYREQTERREQELSALRAGRDESALGTVYQAVAAVLGCPTTDLRPDVHFAELGGDSLAAVSFAGLLAETFDIDIQAATVTNPVHTLWRLAEHIECLRIGTRRRPTCSSVHEDPTAKLHAHELTLEKFFDPMALPVPDRPRIAAAPTVLLTGANGFLGRFLCLEWLRKLADSGGRLICLVRGVDRADARARLEAPFGNVDPRLARDFRALADRLEVVAGDIAEPNLGLSEDDWQKLSENVDVIVHAAAAVNHLHGYGPLFGPNVAGTAEIIRLALTTRLKPVDFISSVAVAAGSDTPPITEDDDLRSVLPTRMVSQEYANGYGSSKWAAEVLLREAHDRYGLPVTVFRSGMMLAHRHYTGQLNNDDTFTRLLFSVIATGVAPKSFYRANEQGERQRAHYDGLPVDFVASSITELGARQQCGYRTFHVVNPHDDGVSLDTLVDHLAASGHAVRQVDDYDEWFTRFGIALRSLPVAGRQQSILPLLHSLHQPAPAQCGSAVSADQFRTAVRVAAPGGSPDIPHLPEGLIDTYLENFRSHGII

SEQ ID NO: 212 - protein, 1063 aa, Artificial Sequence
  Rhodococcus sp. AG1013
MTAETPVDERLVHRVEDLSTTDPQFRAAAPDLAVTAAARRGGLRLSEVVAAYLDGYADRPALGRRAHTLTTDPDSGRTTVALLPRFETITYRALRERAAALARSWQAELPGGVRAGDFVAVLGFTSIDYAVIDLTCIRLGAVSVPLQSSSTARQLAPIVAETAPRVLAEELDRGAALPAVPAFVPAQDDDPLAMLIYTSGSTGAPKGAMYTTDMVTRMWQRSRGPDADVDGRVPAIHVQYMPLSHVFGLGWLVTTLSSGGTGYFAARNAMSSLFDDIALARPTALNLVPRVCEMIFQRYRRELDRRPPGASPDAVKSDLRRNVLGGRVLTALCGSAPLSEAMHSFVESTLDVTVNDGYGSTETGGGVLRNGRILRPPVTDYKLVDVPELGYLTGDEPYPRGELCVKSTNLIPGYYKHPELSASIFDRDGFYKTGDIMAETAPDRLVYLDRRNNVIKLSQGEFVAISKLESVYSTSPYLRQIFIYGSSEQSFLLAVIVPNPDTVGDGDAHTLIAASLQQIADDIDLDSYEIPRDFLLESEPFTRDNGLLSGIGKLLRPALADLYGPRLEAMYDEIAAGQDTRLAELRAAAADLPTLEAVRRAAAVTLGVPDADIPDGDDAGFADLGGDSLAAFTFATTLEQLFDVDVPVQTIVSPIATLGTITKYLDGERSSAATRPTFASVHGRGATIARAEGLRLDAFIDAATLAAAPSLPAPTGTVDTVLMTGANGYLGRFLCLAWLERLARTGGTLICITRGADPAEARQRIVAAIDSGDEDLSVRFRALADDHLEVLAGDVGDPYLGLDQPTWSRLADSVDLIVHSAALVNHVLPYSQLFGPNVVGTAEIVRLAITARLKPVDYISTVAVTALPGGGFIGEDVDVRAASPSRALDASYANGYATSKWAGEVLLREAHDLCGLPVTVFRSDMILAHSRYAGQLNVPDMFTRLMLSLVATGIAPRSFYRLDAAGHRQRAHYDDWLARFEAAIESLPDNQRQHSVRPLLSAYAHPAPARPEAQPPSEQFRAAVQSAGIDGFADVPHLTESLIDKYIADLRRLGLLAASPSDG

SEQ ID NO: 213 - protein, 1116 aa, Artificial Sequence
  Microbacterium sp. AG157
MEQQHDDMSVEAVFAQHADRPALRERFGADVEDTSFHELWDRASAVAAALGETVSPGDRIAMLGAATVDFVTLDLASWILGAVSVPLQASASFEALRAIVDETEPVWLAASAEQSAIAQAIAEASAGDVRTMLLDTAVDTDTSGPTLAELVTRGELLPRPTPWHPAAGEDPLALLIYTSGSTGTPKGAMYSRSMVERLWHARRPGVDDGTTDDIVGYAYLPMSHLTGRAAVFATLGRGGTLALATSTDLSALFDDLRTFAPTEFVFVPRVAEMVRQEGDRDEQRRLAAGDTDQDAVRAAVHADLRVRAFGGRIRRAICASAPLTPELRSYIEECLGTALHDVYGSTEAGSILHDGVVQQPPVTAHKLIDVPELGYRVTDRPHPRGELLVKSTSTITGYFRRPDVTAAVFDQDGFYRTGDIMAQTGPGSYEYLDRRNNVIKLSQGEFVAVAALEATYGGTPEVRQIALHGDSRHAFLVAVVVPADAGSSERDVLAALQRTAREHGLAPYEVPRGVIVEPEPFTVENGMLSDARKLLRPRITARYGERLASLYADLAEERSGALVAALRERVGLEPTLDTVVRAACEFLGAEVSSATAAAARYSDLGGDSLSALTFSGMLEDVFGTEVPVGVITDPTNDLTAIAAFIDRSAADDRPTVARVHGTDPSTLRASDLRLDRVLGGIPEPVLRTSRTPAASEPAGTARGRTVLLTGANGYLGRFLALDWLERLAPVGGTLVCIVRGSDDADARRRLDTAFAADPAFAERFTDLGASLEVRAGDVSERLFGLDEPRWRDLAARVDLIAHAAALVNHVLPYTALFGPNVVGTSEIIRLSIAAGSVPVTFVSSVAVAGGARPTVEAAADPAAPAALDERADIRDTIPAWSIGDEYANGYGASKWASEVLLREAHEQHGVPVAVFRSDMVLAHPRWRGQVNLPDVFTRLVWSVLATGLAPESFVRRGADGERLSSHYDGLPADFTSAAMTAIGASTNAGYRTYNVVNPNDDGVSLDTVVDWLQDDGYAIERIADHAEWVDRFRTALEALPDEDRARSVLPLMHAFATPEEPHAGSTIPADAFVEAIRTIHPLGSPDIPSIDHALITKVADDLSFLKLLEPSRRAVA

SEQ ID NO: 214 - protein, 1146 aa, Artificial Sequence
  Nocardia sp. YIM PH 21724
MYAEDEQVRAAAPDAAIAARVREPGIGLPRIVTTILQGYADRPAIGQRATEITVEDTGRKTVRRLPRFDTVTYGELAERVAAVAAAWAGEEDNPLRQGDFVATLGFISGDYAAIDLACLRTGAVAVPLQAGATRAQQGAILAETEPLLFASSAELLDTAVELVLAAPVTPHHLVVFDYHPGDDKHRAALESARERLAGRVVVEPLTEVLDRGRTLPPAPELSGDDDALALLIYTSGSTGAPKGAMYTQRHVARIWLGMRQLPVINFNFMPLGHVAGRISLYATLARGGTAYFAAESDMSTLFEDLALIHPTELFFVPRVCDMVFQRYQSEVDRRTTAGADPAVLDREVKDELRHEILGDRLIYALVGSAPLAPEMRAFTRSLLGIPLHDGYGSTEAGGGVLLDNRIQRDSVLDYKLIDVPELGYFATDKPYPRGELLLKTNTMIPGYYRRPEVTAEIFDADGFYKTGDIMAETGPDELIYVDRRNNVLKLSQGEFVAVAHLESVYASSPLVRQIFLYGSSERSYLLAVIVPTADALAAHGDSIKSALGDSLQRIGKDAQLQSYEIPRDFLIETEPFSEENGLLSGIGKILRPKLRDHYGPRLQQLYADLAAEQTNELLELRRTAAGLPVLEVVGRAAGALLGCAGADLRPDAHFTDLGGDSLSALSYSTLLRDILGVEVPVGVIVSPANDLTSLAKYIEAERDSSAGRPTAASVHASATEIRAAELTLDKFLDERTLAAASTLPAATGTPRTVLLTGANGYLGRFLCLEWLQRLAPVGGKLVCVIRGSDPAAARARLDAAFDSGDPELLRHYTELARDTLEVLPGDIGDPDLGLDQANWRRLAETVDLIVHPAALVNHVLPYGQLFGPNVVGTAEVIRLAITARRKPVTYLSTVGVASGMAPGEFDEDGDIRRTSPQRRIDDGYANGYGNSKWAGEVLLREAHDRCGLPVAVFRSDMILAHSRYAGQLNLPDMFTRLILSLLTTGVAPYSFYRTDAAGERERGHYDGLPADFTAAAITELGVRVTDGYRTYDVFNPHDDGVSLDLFVDWLIEAGHPIRRLDDYGQWFARFETSLRALPDKQRQASVLPLLHAYREPEPAVRGSAFPTERFHEAVREAKIGPDHDIPHLSRALIDKYVSDLRLRGLL

SEQ ID NO: 215 - protein, 1126 aa, Artificial Sequence
  Myceligenerans xiligouense
MALASTMTAVFERYTDRPALAERTPVPRSDEDLTTFTARAEDSYDLLTYGELAQRVSSVAAQLTDDRRGAGRLTEGDMTAFLGFAGADYVTADLACNLAGITTVPLQTSASLDQQASILATTAPRALAVSVSLLGRAVELLAAQPTITRLLVLDYRGGDPDHVRELESLDGTGVPRPELLDLSGAGAAVVAPWTESRPVMLLHTSGSTGTPKGAIYPERLVTAMWGGDGWSEFFAAEPDVSTFHYMPMSHVAGHSSVRSTLARGGLTYFASSTNLSSLFDDLALARPTELSLVPRVCELMRQEFRRRLQAARSHTPDGDDDVLAASVRDEMRTQVLGGNVRWASCTSAPISAELKAFVEDLLQIDVHELYGTTEIGGVLSNGRFLRPPVLDHRLEDVPELGYYSSDRPRSRGELLIRSTSTIPGYYGRPDLDEQIFTDDGFYRTGDIASVDDTGTVRIIDRKNAIVKLSQGEFVALPSLEGTYVSRSEVLRQVYLHGDGGESSILAVAVPTDELVDRLGGDVPAIREHLLQEFRAIGAAEALNSYEVPRGVLVELEPFSESNGLLSDHRKLVRPELARRYGPVLTAFYESLRSSSDALLESLRDNAGDAPTVATVRDAAAIAIGTSPADIGAEDRFRDLGGDSLTAVHLSNLLEQIFGVRVPVNTIAGEATTIGRLADLLDARRNGDAAVVSFESVHGDAPELLRAEDLRLARFLGDGFTPAPVESPTGDAPTVLITGANGFLGRFLCLEWLHEVAATGGRVICIVRAADDDEAYERLRRAFTSDERLLKTFDRFGHALEVLAGDLSEPALGLDADTWDRLARDVHRVVHAGAMVNHALPYQELFDANVAGTAEVVRLAASVRLKPVSFVSSIATALLAGTESPLDEHADIRRALPSVGTGTKNNVEGYAATKWAGEVLLREAHDSFHLPVTTFRASMILAHSEYVGQINVPDTFSRLVYSLVRTGVVPSSFYAPGGGRPHYDGLPVDVVASCIVALDAAGRGGYSTHHVVNPLDDGVSLDTMVDWLTGLGVELTKVDDHADWHRRLGAGLRALPESERRASILPLLDSFSAPEQPVAGSSIASPGFLARVRDLGLDTRIRSLDARFVEKSLSDLEHVHGRPLRTA

SEQ ID NO: 216 - protein, 1182 aa, Artificial Sequence
  Pseudonocardiales bacterium
MTTATIDTPVKGALFTGGATTDWGKARFELLVVEDAQFRDALPRAAVTDAKRQPGLRLAQVVQTVMEGYADRPAIGQRAREFVTDASSGRTSARILGHFETCTFGELWSRVKATATDWHHHAGHPVKPGDFVAILGFASADYATLALANIHLGAVNVPLQATAPASQHADIIAETEPSVLATGIEYIDSAVEAVLSGTVPPRLIVFDYEPRDDTQRERFEAARERLKAAACPIAVDTLQDVIARGRSLPEVPLHVSEQDDPLTWLFYTSGTTGTPKGAMIAEQTIRNTWLYAAEKPSITLSFMPMSHMVGYGYLFLALANGGTSFCSPKSDLSTLFEDLAMARPTMASLVPRVCEMLYQHYLGEVDRRIAKGADEAAAQQEVKLEMREKLLGGRLLSVGCGSAVLSPEVHQFMLSMLGIHMAIGYSSTEMATATVLVDGRIQRPPVIDYKLADVPELGYFTTDKPYPRGEFLVKIAKFMDGYYKRPDLTAEKFTEDGFYRSGDVMALTGPDQLIYLDRVNNVQKLSQGEFVAIARLEALYTQSPPIRQIYVYGSSDRAFLLAVAVPSAELMTQYVQGGEAADRVKAAIRRALQEVAEEHGLASYEVPRDFLIETEPFSSENGLLTGIGKFSRPKFKDRYGARLEAVYAQIAQDQVSELRALRNGSTDRPVIETVARAVKATLGVAETDVTPQSRFTDLGGDSLSALSFSMLLEEIFGVEVPVGVIINPAGDLRLIADYVEALRSGSTRPSFSTVHAADGTTIHAADFKLEKFIPAEMLAAAPRLPAPAETVRTVLLTGSTGFLGRFQAISWLERMAKTGGRLILVARGANHAQALQRVEEALDSDPALLRHFRALAKDHLEVLPGDLGLPGLGLDEATWNRLAETVDLIAHTAAHVNHVLPYNQLFTANVGGTAELIRLALTHRLKHFDYVSTLGVMALAGRPVGEDGDIREAIPTAELSDDYANGYNISKWAGEVLLREAHDLCSLPVSVFRPGMILAHSRYVGQLNVPDMFTRLLYSLAITGVAPATFYAENLSGGRPVARYEGIAVDLLADAITAIGLANRKGFHAYNLANPHDDGVSLDTFVDWMIEAGCEIERIDSYADWLSRFETAMNALPEEARHQSLLAIMEPYRRPQAAVAKSFVPVERFQSASEAAGHAIPGISAGLIHKYVDDLKQIGFLK

SEQ ID NO: 217 - protein, 1179 aa, Artificial Sequence
  Streptomyces scabrisporus
MPEPQPDHDLAARVTALRAHDPEFARAIPSSRVADAIAGRDGSLVGTIVAAMRGYADRPALARRAERVVRDPDTGRVTLELLPEFEMFGYAEVWRRVVALAGAWAECVEGGLRMGDFVAVVGFTGVDHATIDLACMYLGAVAVPLPTGSPAARLAPIVAETAPRILAADLDAIDVAVETVLRSASVERLVVFDHDARVDAHREVLRAAADKLAGRAEVVSLADELRRGEELPTVLARDDGDPDRLVGLIYTSGSTGTPKGAIYTASMITRMWQNGRGGMTNAGASPDTPLPTIVLHYMPMSHVNGRAWLISGLSSGGIGFFAARGDMSTLFDDIRLSRPTVLSLVPRICDMVRQRYLLEVDRVTRAATETPADTDASTAETTARDRIRDGMLGGRIVSALCGSAPLSAAMHTFMAEVLGTRIVDCYGSTETTRAVVVDGRVRRPPVLDYRLVDVPELGYFGTDKPHPRGELRLKSVGLVPGYYRQPEVDARAFDADGYYRTGDVFAELAPDHLVYVDRTNNVVKLSQGEFVAVSRLEALYATSPHIAQIHVHGSPEQAFLLAVVVPARSGAAPADDDTMRTRILDAMRELARDAGLAAYEIPYDVILEPEPFTVANGLLSGIGKPLRPALVARYGARLEGLYADIAAGRAGRFAALRAAGPHAAPLDAVLAAVQVTLGHPASALRPDVGFAELGGDSLSAHTFATVLEQIFDVEVPVQLVLGPTGTPARIAEHLGAAREPHPARPTFASIHGRDAVEVRADELTPDRFMDAGLLRRPASPPSGAPARTVLLTGATGYLGAFLAVEWLRRVADTGGRLICPARADDDAAARERVVRCLRAASADRPGWFDTVAARHLEVPAADVSAPRLGLDASTWRRLAAETDRIVHAAALVNHVLPYGRLFGPNVVGTAELIELALTGPAKPFTFVSTIAAALEPDGSVLDETVDVRTAAPVRRLDDSDANGYAAGKWASEVLLRAAHERTGLPVTVFRPDMILAHRRLPGVVNLPDRFTRLILSVVATGMAPLSFHHLDADGRRRRAHYSGLPVDFTAAAIAALGADASDGYRTYHAVNANDDGVSLDEMVDWLIAAGHPITRFADYEQWRMRFEAALRGLPEQRRRGSLLPLLPAYARPSEPRPAGAVPNARFTAALAAVGGEPVPSITPDYLAKCVADLRGLDLL

SEQ ID NO: 218 - protein, 1183 aa, Artificial Sequence
  Mycobacterium [tuberculosis] TKK-01-0051
MDSTSRTASRLPADPGRYAGAEARVAELCSSDSQVRAARPDPDTTAALGIRDLPLLDLVRTVMSRYADRPALGERVRQPFTHPGSGNTELRLLPEFATITYREVWTRAEAIATAWHHMRPHGLEAGDFVAICGFTSIDYTTVDLACLRFGAVAVPMQSSATVEELVALTAQVGPKVVACSVETLPRVVECVRRTPSVQRVIVFDYHPAADQQRDTVDAAGAALAPQAVDVVSLADVISFGRDLPAPPPIADAAAAERLSVLLFTSGSTGTPKGAIYTERMAAGFWRGIPQTVCTHPAITLTYLPMGHASGRLVLYGVLGSGGTVYFTAGSDLSTMFEDVTLVRPTEILFVPRFCEAVLQRCRAEWGAGGDTDRACADLGALSGALTKADAWPSLRERLLGGRLLSAWTGSAPLSTAMTNFMELLVGLPLLGVFGSTETGTIMLDGVVSRPPVLDYKLQDVPELGYHGTDEPFPRGELLLKSDSLFPGYYLHPEATASAFDRDGYYRTGDVMAEIGPDRLAYVDRRNNVLKLSQGEFVVVSRLEALFATCPLLQQVFLYGNSERPYLLAVVVPTEDALGGITPEELRLRIIESMRRTAKGAGLNSYEIPRDVLIEPTPFSTSNGLLTVTRKLARQRLVNHYRRRLERRYAELAERELQGSRAPSTSHPPSAALDGVVQAANLVLGLCDSAPADSRFVDIGGDSLSALLFANRLTQAFGVEVPVSMVIGPNGSFRRLAAYIDDARGTRSRRATAATVHGVDATSVRACDLKLEKLLPARTFEAARELQFQPTEIKTVLLTGANGYLGRFLCLGWLRRVAANGGRLICLVRGENAEEALRRLESVFETDPDLATLFAEHAEQHLEILSGDISEHQLGLADHTWQRLSESVDLIVHSAALVNHALPYAALFGPNVAGTAELIRLALSSRIKPISHVSTAAVLPGLDASAEDTDIRAVKSSCPLDGGYANGYVTSKWAGEVLLREAHEAFQLPVAVFRPGMVLAHSQYTGQLNVDDVFTRLVLSLLVTGLAPRSFHPATSRLFASCNALPAEVVADAITTIGETATQGHQAINLHPPHSDTVSLDVIVDWLSETGHLIQRVEDFDQWLIQFTAALHALPDQLRRRSILPVLHTLTDPATPVPPCSHSARTRRSQPADNPSGAESGEVAGVSRALVHKYAQDLRELHLM

SEQ ID NO: 219 - protein, 1173 aa, Artificial Sequence
  Mycolicibacterium llatzerense
MSNEETALTDELTQHIADLCATDPQLAAARPLAAVGAALDEPGIRLPDMISAVMAAYADRPALGQRAVEYVTDDAGRTVSRLLPRYDTITYGEAWRQIKAIGNALLAGPDAVAAGDRVAMLGFTSAEFTIIDTALARVGVVAVPLQTSAPAEQLRPILDETEPVGLFADVKFLDEAVELVSGSGAAVKRVVVFDHHAQVDDDRAAVERAATQLAERGVVVETLADLVTRGTALPTVEPVVSADPDPLLVLIYTSGSTGTPKGAMYPERLVANAWRTGLTHQQPALPSIVLSFLPMSHMMGRGTVYRTLAHGGTVYFAAKSDLSTLLEDIALVRPTQMTFVPRVWEMIHQEVQSEVDRRALDGVSEQQVLDERSVSLIGGRQLVAMTGSAPISPELKAWVQKFLGLELMEAYGSTEAGGVMISGHLSRPPVLDYKLIDVPELGYLSTDRPHPRGELLLKSTDLIPGYYKRPDVTADVFDVDGFYRTGDIVAELGPDHLQYLDRRNNVLKLAQGEFVTVSKLEAAFGTSPLIRQIYVYGNSSRSYLLAVIVPTSDALAGVSGAEALRPELADALQTVARESGLQSYEIPRDFIIETEPFSLENGLLTGVRKLAWPKLKARYGAELEQLYTELAEGQAAELRALRSLRASDAPVLETVLRAVGATLGAASSDVAGDAHFTDLGGDSLSALTFGNLLEEIFEVEVPVGVIVSPATDLAGVAAYVEGERAPGSKRPTFSTVHGRGATEARAADLTLDKFIDAATLAAAPSLPGPVSEVRTVLLTGATGFLGRYLALEWLERMDLVDGKVICLVRGKSDADARARLDATFDSGDPKLLQHYRSLSDHLEVIAGDKGEANLGLPQEVWQRLADTVDFIVDPAALVNHVLPYSELFGPNALGTAELIRIALTTRIKPFAYVSTIAVGGGVAPGQFVEDADVRVMSAVRSVDDSYANGYGNSKWAGEVLLREANDLCGLPVSVFRCDMILADTTYAGQLNLPDMFTRMMFSLVATGIAPYSFYELATDGNRQRAHYDGLPVEFVSESISTLAVQVAAGESDSTFETYHVMNPYDDGIGMDEFVDWLIEAGYSIARVDDYADWLARFETGLRGLPDRQRQASLLPLLHNYQQPSYPVPGSIAPVERFRAAVQNAKVGADKDIPHIGAPVIVKYITDLQLLGLL

SEQ ID NO: 220 - protein, 1175 aa, Artificial Sequence
  Rhodococcus sp. 06-469-3-2
MTHTLAVDSEREREIRGRDRFTELHRIDDEFRAAEPDSAVADAAQELSPNLARVVAEIMTRYSDRPALGRRAREIARVDDTTTLRLLPRFETVTYGRAWNDAGALASALTHDAFGIASGDFFATLGFASADYVVAELATIRLGAIAVPLQAGATAGQLSAIAAEVEPVVLAADVDNLSVAVQVATHCRSIRRIVVLDYDGAIDAHTQIMETARSVAEQAGVFVRPLTELVRDGAQLPSVPLPDAEDPDRLATLIYTSGSTGTPKGAMHTERIVCGAWTGAWHHTGASSESTDGPAFPVITLDYLPMSHLAGRGLVFSTLAAGGTVHFAGASDLSTLFEDFALARPTMALLIPRVCEMIRHNVLAEIDRETERTAGGDADRTRREVLERNRIEQFGGRVLAAMVGTAPIADEVKDFVSELLDIRVRDNYGSTEAGMVLHDGVVQRPPVIEYKLDDVPELGYFSTDTPHPRGELLLKTTSIIPGYYKRPDVTADVFDSEGFYRTGDVVAEIEPDRLAYVDRRKNVLKLAQGEFVALARLEALFGTSELVNQIFVYGNSQRAYLLAVVVPADPDTTAGSVIESLQQIARTEALNSYEIPREVVIEHDPFTQENGLLSGAGKQLRPKLVERYGEELERRYAELETGQNDRLRELRRTGADAPVLTTVGDAAQALLGCAGSDIRPDAHFSDLGGDSLSALTFSTLLREIYDVDVPVGVITGPAMDLAALAEYISSARDNDSDTATFASVHGRGAAVARASDLRLSAFLDDALLDAAHRIAGPRERTGTVLLTGANGYLGRFLCLEWLGRMAETGGKVICLVRGRSDSDARARLDAAFDSGDARLSERYRTLADAALEVVAGDLGTPHFGLDRDVFEALAERVDRIVHPAALVNHALPYEHLFGPNVVGTAEIIRLALTDHVKPVTYLSTVAVAAGVEEFRENGDIRVDSPSRAVDDSYANGYGNSKWAGEVLLRNAFDEFGLPVSVFRSDMILAHSTWTGQLNVPDVFTRLILSVVATGLAPHTFYATDTGAPTDEKGRPLAHYDGLPADFSASAITSIAGGDTSGYRTFDILNPHDDDISLDTFVDWIRDAGRDIEIVENYDEWFERFNAAVEALPEKQRSHSLLPLIDSYARPQHPSSGAILPADEFASAVGDIPHLGRELIEKYLSDLLALELVSTR

SEQ ID NO: 221 - protein, 1148 aa, Artificial Sequence
  Gordonia sputi NBRC 100414
MSTHLSADPAAAVSARHPDSDVAARLREETSVEGALRVLFEGYADRPALGFRDAEHESRWSTSSFREVGNRVAAFASLLRDAAGVRPGDRIATLGFTSADYTAVSLAILGPLHAVEVPLQSGAADSVFADILDETEAKVLAVSTNSLSRVTTLIENGTRADLAHLVVFDVSEAALDAVERARALLEPLGITVHHAHFDAESSITDDAEEALQVSGDAQPDDLALLIYTSGSTGAPKGAMYTQDAVLRLIRQGFGLETDCATGEDDASEDHAWVTLNFLPMSHVMGRATLMRTLGNGGTAYFTARPDLSELLDDLAAVAPTELHFVPRIWEMLHQQYLSEIEGVESDSHADALAAMRRRYFERAQLAVTGSAPISPEVVDFVESMLDAPLVEGYGSTEAGGVIRDGAVIRPPVVDYKLVDVPELGYRTTDTPHPRGELLVKTTDIFAGYYRRPELTAEMFDDDGFYRTGDVMAETGPDQLVYLDRRNNVLKLSQGEFVTVARVESALTSPPIRQIYVYGNSARPYLLAVVVPTDDAVDGASDDGELHATLLRAVRDIGERNGLAPVEIPRDIIVERTAFSEANGLLTGIRKLARPRLKEAYGPALEDLYLHLANARADRLRDARVSAASRPTLDVLIDIVSATLDLAGNEVTAHSRFTDLGGDSLTAVTLGNTLRDVFDAQVSVGVLTSPSSDLAAIADYIDGREGEARPTADTVHADQQHLRADELTVDAFLDEATLAGASTVPPAAETVREVLLTGATGFLGRYLTVEWLRRVACVDGHVTCLVRASDDDTARRRLDAVFDVGDGPLRSDYLRLAPDHLTVLAGDKDSPSLGLDDAVWNRLAADVDLIVDPAALVNHLLPYRELFGPNVSGTAELIRLALTTTRKPYVYISTVGVADQVGSAELVEDKDIRELNATREVHEGYANGYGNSKWAGEVLLADAHDRFGLPVSVFRCDMIVADDSDLGQLNLPDMFTRLLMSVLATGLAPQSFYRLDADGGRGTAHYDALPVDFLAAAISTLAVSDGHVTYNAVNPHSDGIDLDTFVGWLIESGEEIALVDEYDHWYRLFSDALVDLPEKQRRHSLIPLLHNYVRPVEPVDAGVVNAPLFAEAVRSGQVTTATAEYADIPHITSQVIANYARRLRTLGVV

SEQ ID NO: 222 - protein, 1172 aa, Artificial Sequence
  Mycobacteroides abscessus subsp. abscessus
MSIDHAESATDELARRIADLAANDPQFAAAVPLLSVAQSVEKPGMRLPEIVKTVLEGYADRTALGQRAVEFVTENGRTVARLLPKYDTITYGELWDRIRAVAAALHADGVKAGDRVAILGFTSTDYTVIDTALGQIGAVSVPLQTSSASSSLLPIVAETEPVLIAVSADYVADAVELAVGGPAPARFLVFDHHVEVDDERDAIDRAREALAGLNVTVETFGDVLSRGRELPDAPTPVFDEADPLALLIYTSGSTGAPKGAMYPESNMTSFWRRASTAWFGPSEASINLAFMPMSHVMGRGILYSSLANGGIVYFAAKSDLSTLLEDFALARPTELNLVPRVWEMLYLEFQSRVDKLVPAGAGEAERDDIEQQVMADMRQNLVGGRYIKAMTGSAPITDELKAWVEKFLGIHLLEGYGSTEAGMVFFDGVIQRPPTLDYKLVDVPDLGYYLTDQPYPRGELLVKTQYLFPGYYKRPEVTASVFDEDGFYRTGDVVAEIGPDQIQYVDRRNNVLKLAQGEFVTLAKLEAAFSNNSPLVRQIYVYGNSAQPYLLAVVVPTEDALARWDSAELKQRISDSLQEVAKAAELQSYEIPRDFIIETEPFSLENGLLTGIRKLAWPKLKAHYGPALEDLYVSLAAGQADELRQLRQHGAEGPALPTVIRAASALLGASGEVSADAHFTDLGGDSLSALTFGNLLEEIFGVEVQVGIIVSPANDLAALAAYIENERSGGAKRPSFSSVHGKNAVEVRAADLTLDKFLDAATLAAAPSLPGPASEVRTVLLTGATGFLGRYLALEWLERMDLVDGKVIALVRAKSDDEARARLDATFDSRDPKLLAHYQALAADHLEVIAGDKGDENLGLSQEVWQRLADEVDVIVDPAALVNHVLPYSELFGPNALGTAELIRIALTTRQKPYIYVSTIGVGDQLTPGTFTEEADVRVMSPVRAVHDGYANGYGNSKWAGEVLLREANDLCGLPVSVFRCDMILADTSYAGQLNLPDMFTRMMFSLVATGIAPYSFYERDAEGKRQAAHYDGLPVEFIAEAIDTLGVRPAGEFVTYHVMNPHSDGLGMDEFVDWLIEAGYSIARVDDYAEWLARFETTLRALPDRQRQASLLPLLHNYQKPEHPHNGSIAPVVVFREAVQEAKLGPDKDIPHVTAPVIVKYITDLQLLGLL

SEQ ID NO: 223 - protein, 1165 aa, Artificial Sequence
  Mycobacterium sp.
MFAEDDQFRQARPDVAVRAAARQPGLRLPQVIETLVRGYADRPAMGWRARGLTNDPETGRTIGTLLPRFETITYRELWSNVAAIAAAWRGDPENPAAAGDFVATVGFASVDYLTIDLVSGYLGLVAVPLQHNTTASRLQPILAEVQPQILAAGADYLDLAVDAALGSDSVRRLVVFDYRPEIDDQRESLARAQQKLASAGMTVHIETLDDVITRGRTLPPEPTYTGGDDQRLAMIMYTSGSTGLPKGAMYSERMVAKIWTNELMPDREDVPVFNVNFMPLNHLGGRIPLSTAFQAGGTSYFVPESDLSTLFEDWNLVRPIEMGLVPRVAEMLYQRYQSAVDRRVFDGMSVAEAEAQAHVELREQVLGGRVLTSFTGTAPLAAEMKTFVETCLGVHLLDGYGLTEVGMVTKDGLVTKPPVIDYKLVDVPELGYFRTDRPYPRGELLVKSATAMSGYYQRPDVTAAAFDSEGYYRTGDVMAQIGPDRLTYVDRRNNVLKLAQGEFVAVARLEAIFATAPLIRQIFVYGNSERPYLLAVVVPTDEALGRFPDDDAAISAALSESLRQTAKLAELQSYEVPAEFLIEREPFSTDNGLLSGVGKLLRPKLKERYGDELEQLYAQLADTRDAQLRSLRHGAADRPVIDTVAHAAEALLGLVGGAPDPAEHFMDLGGDSLSALTFANLLQDIFDVEVPVALIIGPTSSLRLIADHIEAGRESGSQRPSFATVHGRGASQVRATDLTLDKFIDAATLSAVASLPRATGTPRTVLLTGANGYLGRFLALEWLERLNETGGRLLCLVRGTDPEAAYRRLEDVFRSGDPQLLQRFQTLAADHLEIIVGDIGEPNLGLSEEVWHQLAQRVDLIVHPAALVNHVLPYDQLFGPNVVGTAELIRLAISGRVKPITYLSTVAVAMSVDAFTEDGDIRAVSPTRPVDDSYANGYANSKWAGEVLLRYAHDLCGLPVAVFRSDMILAHSHFAGQLNVPDAFTRLIFSLLVAGIAPGSFYRADGSRPRAHYDGLPADFVAEAVATLGELTATETAPVFRSFDVMNPHDDGISLDVFVDWLIDAGHDIHRIADYDEWLGRFETALRALPDKQRQYSLLPLLDAYRIPQDALPGAPAPTEVFRGAVRDAKIGVDNDIPHLSATLIDKYVADLQLLGVIPGRSARS

SEQ ID NO: 224 - protein, 1141 aa, Artificial Sequence
  Mycobacterium decipiens
MRLRTIMMSAFDHFAERPALAERRHIPTTNEQISSMDNRVLGAYETLTYKAVGQRVASVAAQLRSETGTRPSILPGDRVALLGFAGIDFTTVDFASNLTGITTVPLQTSGTYEQQSAVMKETMPRVLAVTVALLDRAARLVADHASVERVIVLDYRGGESEHHSAVEAAAREISISLEILDLDNGQYVADPEHEGTGEDALAMLLYTSGSTGTPKGAMYTERLLAEMWGGEGWSEFFAEAVDIANFHYMPMSHVAGHSSVRSTLARGGVTYFASTTNLSSFFDDLSLAQPTELSLVPRVCELLHQEYQRRLQAIATQPAGKSTPDTDSDAAAMKVLADMRQGTLGGNIQWASCTSAPVSAELKSFMESLLGIELHELYGTTEIGGVLADGRFLRPPVISYQLQDVPELGYFSSDRPHARGELLIKSTSTVPGYYNRPELNREIFTDDGYYRTGDIASVDDDGRVRIIDRKNAIIKLSQGEFVALPSLEAKYTAGSDVIRQAFLYGESDQSSIVGVVVPSDELRTELADDLAAIQTRIVREFRKVAGDENLNSYEIPSAVLIDFEPFSETNGLLSDHRKPVRPRLVEKYGPRLSALYQELRSGRDQLLDWLVAHGAEGETVSTVRTAIAVAIQADVEDIAESAKFRDLGGDSLTAVYLSRLFEQIYSIRVPVDTVVSESYTIRQLAEYIDTKQLSGLDSASFEEIHGAEPHLLQAADLTLPRFFDDEIPLPDPLPAAGDAKSVLITGASGYLGHFLCLQWLRQFAGTDNRVTCLIRASDDVAARSRLRKAFSTSETLLAEFDGLSANLDVIAGDISEDQLGLDDPTWKRLTQDLTEIIHAGAMVNHALSYRELFAANVSGTAGVIRLAITGPLKPVTFMSSIATALLTGTSSLPLDELSDIRQALPEIEMAGGIVDGYAATKWAGEVLLRDAHARYDLPVTVIRSSMILAHSEFRGQINVPDTFTRLLYSLIRTGLAPSSFYTHDGDRAHYDGLPADVVAQAIASLTHRDERKTFATFHLVNPFDDGISLDRMVHWLIEMGVPLIRIESYGEWLHRFTAALNALDKDDKRPSVLPLLEGFSQPEEPAHGSLIGSPELTAALSATGSDATLSVLTSDFIRKCVEDLEYVFGQPIPHGSLASAR

SEQ ID NO: 225 - protein, 1184 aa, Artificial Sequence
  Mycobacteroides abscessus subsp. Bolletii
MTVTNETNPQQEQLSRRIESLRESDPQFRAAQPDPAVAEQVLRPGLHLSEAIAALMTGYAERPALGERARELVTDQDGRTTLRLLPRFDTTTYGELWSRTTLVAAAWHHDAAHPVKAGDLVATLGFTSIDYTVLDLAIMILGGVAVPLQTSAPASQCTTILAEAEPNTLAVSIELIGAAMESVRATPSIKQVVVFDYTPEVDDQREAFEAASTQLAGTGIAIETLDAVIARGAALPAAPLYAPSAGDDPLALLIYTSGSTGAPKGAMHSENIVRRWWIREDVMAGTENLPMIGLNFMPMSHIMGRGTLTSTLSTGGTGYFAASSDMSTLFEDMELIRPTALALVPRVCDMVFQRFQTEVDRRLASGDAASAEAVAAEVKADIRDNLFGGRVSAVMVGSAPLSEELGEFIESCFELNLTDGYGSTEAGMVFRDGIVQRPPVIDYKLVDVPELGYFSTDKPHPRGELLLKTDGMFLGYYKRPEVTAGVFDADGFYMTGDIVAELAHDNIEIIDRRNNVLKLSQGEFVAVATLEAEYANSPVVHQIYVYGSSERSYLLAVVVPTPEAVAAAKGDAAALKTTIADSLQDIAKEIQLQSYEVPRDFIIEPQPFTQGNGLLTGIAKLARPNLKAHYGPQLEQMYAEIAEQQAAELRALHGVDPDKPALETVLKAAQALLGVSSAELAADAHFTDLGGDSLSALSFSDLLRDIFAVEVPVGVIVSAANDLGGVAKFVDEQRYSGGTRPTAETVHGAGHTEIRAADLTLDKFIDEATLHAAPSLPKAVGIPHTVLLTGSNGYLGHYLALEWLERLDKTDGKLIAIVRGKNAEAAYRRLEEAFDTGDTQLLAHFRSLARQHLEVLAGDIGDPNLGLDADTWQRLADTVDVIVHPAALVNHVLPYSQLFGPNVVGTAEIIKLAITTKIKPVTYLSTVAVAAYVDPTTFDEESDIRAISAVRPVDELYANGYGNSKWAGEVLLREAHDLCGLPVAVFRSDMILAHSRYTGQLNVPDQFTRLILSLIATGIAPGSFYQAHATGERPLAHYDGLPGDFTAEAITTLGTQVVDSYETYDCVNPHADGVSLDNFVDWLIEGGYPIARIDNYTEWFTRFDTAIRGLPEKQKQHSLLPLLHAFEQPSAAENHGVVPAKRFQHAVQAAGIGPAGQDGTTDIPHLSRRLIVKYAKDLEQLGLL

SEQ ID NO: 226 - protein, 1132 aa, Artificial Sequence
  Pseudomonas fragi
MSLASIVATTMTLHADSPALGERHYRLITNNITKEVRSQLLPGYTTVTYSELWQRVKFLAAELHHHPYAPITAGCPVAFLAFTSGDYATLDLACIYLGAVTVALQTNASGSHINSILKETAPLIIAVSIDHLDVAIDAVLNTPSISRIVLLNYYPAVSEHSSKRSTARRRLSEHSSTVSIDCLNEIITTGKSLPDAPLYNSPNADDELSMLIYTSGSTGTPKGAMYTQKLASGMWGGSWATIFSKEPPISFHYMPMSHVAGHSSLKSTLARGGTCYFTAKSNLSTLLEDISLCRPTELSLVPRICELISQTYQLALIKHNVAQGDQKATSILEYIRTNTLGGRIAWASCSSAPLPDTLKLFMETLLNIPIHNVYGSTEAGAVWIDNELLNPPVLNFKLIDAPELGYFTTDLPFPRGELLLKTLSIIPGYYKRPDLATELFDELGYYKTGDIVAQTGSHRLEFVDRRKNILKLSQGEFIATSQLETLYSAIPEIQNIYIYGKGEWSYFLAVIIPYNNLTKRLDEKAETIKQFFMNAIRQHAKINKLRSYEIPRDVLIDNTPFTQQNGLLSDHGKPMWPKLRQKYALHLENLNSQLISQDRGKLQNLHQRVDKQPVLEILKNAVCSLVGGTAEMISPEAQFRDLGGDSISAVNLASLLSDFYAINVPVDLLISPGYDLQYISEHIEKALQTHKSRPSCESIHSLTPFTFHAKDLQLEHFINPDILHKANTLNTPPHPVKTILLTGSSGYLGRFLALQLLESLGAQGGTLICVVRAKDIQTANKRFQESFGRGDTAISRKVRALSKLHLEVLAGDIGEPKLGLDEATWERLSSEVDCIFHAAALVNHLLPYASLFNANVNGTSEIISLALSCHLKPIVFLSSIAVASLAGAQPTLDEDMDIRIAAPVVEAHDTYAVGYGLSKWACEVLLREANSQYGLPVTTFRSSMILAHSSYPEQLNIPDMFTRLLLSLVQTGIAPQSFYRQAEKEQKPHYDGLPVDFTANAIVRIGLDKQKNSYRSINLVNSHNDGISLDTVVDWLSELGINIKKISKYADWHQQFERKLLALPKSLQQHTSLPLIHSLSEPAEVISGSTISSKRLHETFQAVNSDKVTVPHLSKTLIHKYLTDLQSLGLLN

SEQ ID NO: 227 - protein, 1179 aa, Artificial Sequence
  Rhodococcus sp. 15-1154-1
MKSMPITEGNSRMTSSTATTATDHALRRRFAELHRTDEQFRSAEPDHGVAAAALALKPNLAAVVQQVMIGYGDRPALGRRARTIVDGAASLLPSIDTITYAETWDRAGATAAALVHGENPVQPGDFVATLGFASVDYAVVELATVRLGAVAVPLQAGASATQLIDIVAEVEPAVIAADSENLAVAIEIAQQSPSVHTVIVLDHDDRVDADRERLTAARVLDAVSLSTLADVIERGRAQGPYPLVESDDPERLATLIYTSGSTGTPKGAIHTEAIVTGTWTGAWHSTGSESDSDAGPGFPVITLDYLPMSHLAGRGLVFSTLAAGGTVTFAGSSDLSTLFDDFSLTRPTLALLVPRVCEMIRHTALAEIDRRVDAGADPATVRDVVLGEFRRDTFGGRVLAAVVGTAPIATEVKDFVAELLDAQVQDNYGSTEAGMVLHDGVVRRPPVIDYKLDDVPELGYFVTDTPHPRGELLLKTESITPGYYKRPEVTAEMFDAEGYYRTGDVVAELAPDHLAYVDRRKNVLKLAQGEFVALARLESVFGTSDLVDQIFVYGNSQRSYLLAVVVPAPGVDDPGSILASLQTIARDAGLNSYEVPREVIVETESFTQDNGLLSGAGKQLRPKLVDRYGATLEARYTELEESQSGRLRDLRRRGPDAPVLATVGDSAVALLGCAGTDVSPDVRFADLGGDSLSALTFSNLLRDIFDIEVPVGVITGPSTDLRGIADYISARQDSDTDAVTFDSVHGRGATVVKASDLTLDAFLSADALKAAQDAERPRPTTRTVLLTGANGYLGRFLALEWLERMADVGGTVVCLVRGRDAADARARLDAAFDSGDAELSARYRALAYAALEVVAGDIGESRLGLDENTWNSLATRVDRIVHPAALVNHALPYPHMFGPNVVGTAEIVRLATHHHLKPVTYLSTVAVAAGVDEFVENGDIRVESSSRSVDESYANGYGTSKWAGEVLLRNAFDDLGLPVTVFRSDMILAHSTWSGQLNVPDVFTRLVLSIAATGIAPNSFYRSDTGAPLDDAGRPRAHYDGLPADFSAAAITTLGGDTVDGYTTYDVLNPHDDGISLDTFVDWMIESGRSIERIEDYDEWFAKFSAAIDELPEPQRSRSLLPLLHAYEHPDVPAAGSHLPADVFRAAVREESDDIPHLDRALIEKYLSDLEQLGLLAPV

SEQ ID NO: 228 - protein, 1175 aa, Artificial Sequence
  Rhodococcus sp. 05-340-1
MTHTLAVDSEREREIRQRDRFTELHRSDREFRAAEPDSAVADAAQELSPNLARVVAEIMTRYSDRPALGRRAREIARIDDKNTLRLLPRFDTVTYGQAWSDAGALASALTHDAIGIASGDFFATLGFASADYVVAELATIRLGAIAVPLQAGATAGQLSAIADEVEPVVLAADVDNLSVAVQVATQCRSIRRIVVLDHDGAIDAHARIMESARSDADRVGVSVRPLTELVGDGAQLPEVPLPDDEDPDRLATLIYTSGSTGTPKGAMHTERIVCGAWTGAWHHTGASSEASDRPAFPVITLDYLPMSHLAGRGLVFSTLAAGGTVHFAGASDLSTLFEDFALARPTMALLIPRVCEMIRHNVLAEIDREVERSAGGDADSTRREVLERNRIEQFGGRILAAMVGTAPIAPEVKDFVSELLDIRVRDNYGSTEAGMVLHDGVVQRPPVIEYKLDDVPELGYFSTDTPHPRGELLLKTASIIPGYYKRPDVTADVFDSEGFYRTGDVVAELEPDRLAYVDRRKNVLKLAQGEFVALARLEALFGTSELVDQIFLYGNSQRAYLLAVVVPARPDTTAGSVIESLQEIARQESLNSYEIPRDVTVEHQPFTQENGLLSGAGKQLRPKLVERYGDELERRYAELESGQNERLRELRRSGADAPVLTTVGDAAQALLGCAGSDVRPDAHFSDLGGDSLSALTFSTLLREIYDVDVPVGVITGPAMDLAALAEYISSARDNDSDTATFASIHGRGATVAEASDLRLSAFLDDALLDAAHHIPGPREQTSTVLLTGANGYLGRFLCLEWLERMAEIGGKVVCLVRGRSDSDARARLDAAFDSGDAELSERYRTLADAALEVVAGDLGTPRFGLGDEDFRTLSERVDRIVHPAALVNHALPYEHLFGPNVVGTAEVIRLALTHHVKPVTYLSTVAVAAGVEDFRENGDIRADSPSRAVDDSYANGYGNSKWAGEVLLRNAFDEFGLPVSVFRSDMILAHSTWTGQLNVPDVFTRLILSVVETGLAPHTFYATDTGAPTDEKGRPLAHYDGLPADFSASAITSIAGGDTSGYRTFDILNPHDDDISLDTFVDWIRAAGRDIEIVDNYDEWFERFNAAVEALPEKQRSHSLLPLIDSYAHPQHPSSGAMLPADEFASAVGDIPHLGRELIEKYLSDLVALELVSTR

SEQ ID NO: 229 - protein, 1177 aa, Artificial Sequence
  Mycobacterium dioxanotrophicus
MTDDARQQRLVQRIQQLHATDPQFRAAAPDPDVSLRIQDPELRLWQAIDACLTGYADRPALGLRSREVVRDPATGRTTTSLLAGFDTITYGRLRDNVVALTNTWHASGFKPGDFIAVLGFTSIGYTVIQLACARLGAVFVPLQTSSSARQLAPIIAETTPRIFAASVESLDTAVELIIEAPSVQRLVVFDYSEADDDQREHVEAATARLAAAGRAVEVVPLVADMDAGRSMAEAAPFLPAPGENPLATLVYTSGSTGAPKGAMYTTDLMTRLWQRPRSPSLDIGIEIPAIHLQYMPLSHVYGMAWLISTLTSGGIGYFAAKSDMSTLFDDITLVRPTALNLVPRVCDMFFRRYRKELDQRTAAEPTAADLEETVKAELREDFLGGRVISAMCGSAPLSKDMHAFVESLLDTAVSDGYGSTENGGGIMRNGVVQRPPVTEYKLVDVPELGYATTDKPHPRGELYLKTTTLIPGYYKHPELSADIFDADGFYKTGDVMAEIGPDHLVYLDRRNNVIKLSQGEFVAVSNLEASYSTSPYIRQIYIYGSSDQPFLLAVIVPNADGVGAGDARSLITNSLQHIAAENHLNPYEIPRDFLLEPEPFTRDNGLLSGVGKLLRPALKRHYQDRLDAIYAEITAGQDNQLDALRAASRHQPTIETVRGAAAATLGLETGGLDLPADAKFIDLGGDSLSAFSFATLLEGIFSIDVPVQTIVSPTATLTTTAEYVDGERQSASTRPTFASVHGRDAEVAKATDLTLDKFIDAATLAAAPTLPAPSATVNTVLMTGANGYLGRFLCLDWLERLAPTGGRLICLARGADPIAARQRIEAAIDSGDETLSKRFRELADKHLEVLVGDVGAANLGVDTATWKRLADSVDLIVHSAALVNHVLPYSQLFGPNAVGTAEIIKLAITDRLKGVNYISTVAVTALPDGTYVGEDVDVRAASPARSLGAAYAGGYATSKWAGEVLLREANDLCGLPVTVFRSDMILAHSTYSGQVNVTDMFTRLIFSIVATGLAPKSFYTLDAAGNRQRAHYDGLPADFTSAAITALGAASTTGYHTYNVLNTHDDGISLDEFVDWLIAQGLPIERIDDYDEWRERFEEAMKALPEDQRKNSVLPLMSAYAHPAPPTGGVAMPAEKFRAAVQSAGIGAGRDVPHLSEELIAKYIADLRQLGLLHDAG

SEQ ID NO: 230 - protein, 1168 aa, Artificial Sequence
  Mycobacterium kubicae
MFANDPQFRAAAVIPEVTQAAHRPGLRLSEIVDTYLQGYADRPALGQRAGEVTRDDTTGNATTTLLSGFETITYRELRERVVALANAWHAGLPGGFTPGDFVAVLGFTSVDYAVNYLACIRLGAVFVPLQTSSTAAQLKPIVTETQPRVFAVSVESLEVAVDVISDVASVQRLVVFDYTGEDDSQRQRFEHATARLVDAGHRAQVVSLAAELESGRTLEPNPAFVPAAGENPLATLIYTSGSTGAPKGAMYTSDMKTRLWQRPHSPSVDIGIQIPAIHLQYMPLSHVYGLEWLIATLSSGGIGYFAAKSDMSTLFEDIALVRPTALNLVPRVCDMFFRRYRRELDQRSAGGLTEEQLDDMVKAELRQDFIGGRVLSAMCGSAPLSKQMHAFMESLLDVSVTNGYGATETGGGILRNGIIRRPPVTEYKLVDVPELGYFTTDKPHPRGELHVKATTVIPGYFKHPELSAQIFDDDGFYKTGDIMAEVGPDHLVYLDRSNNVIKLSQGEFVAVSQLEATFSTSPYIRQIFLYGSSEQPFLLAVIVPNTDAIGDADPHALIAESLQRIAGEAHLNAYEVPRDFLLESERFTRDNGLLSGVGKLLRPALKARYGERLEAMYADIEASQGNQLDELRAASRELPTLDTVRRAAAATLGVPVDDGLGADARFIELGGDSLSAFSFATLLESIYDIDVPVQTIVSPTATLATIAKYIDGERTSVSTRPTFASVHGRGATVARAADLTLDKFIDADTLTAARDMTAPSGPVNTVLLTGANGYLGRFLCLEWLERLAASGGTVICLARGADPIAGRQRIEAAMDSGDDELCSRFRELADKHLKVLVGDVGAANLGLDQATYDRLAESVDLIVHSAALVNHVLPYSQLFGPNVVGTSEIIKLAITKRLKPINYISTVAVTALPDGGFLGEDVDVRSASPSRSLDESYASGYATSKWAGEVLLREAHDLCGVPVAVFRSDMILAHTRYSGQLNVPDMFTRLMLSVVATGLAPRSFYQLDASGNPQRAHYDGLPADFTAEAITTLGGHCTEGYHTYNVLNTHDDGVSLDTFVDWLVASGHHIDRIDDYRDWLTRFEAAMKALPETQRRNSLLPLMTAYAKPGKPTQGTGVPAEKFRAAVQSAGIGATKDVPHLDEALIDKYVTDLEQLGLLDAHAGASAR

SEQ ID NO: 231 - protein, 1156 aa, Artificial Sequence
  Mycobacterium colombiense
MLRSRIAELCDEDPEVNRSRPSPSVDAALRRPRLKLAEIVQTAMEGYADRPAVGQRRREFVTDPATSRTSTRLLPEFETMSYRQLWSRVRAVATEWRGHERHPLSPGDFVCILGFASIDYATVDLACLCSGAVVVPLQAGAPAAQHRLIMTETNPLILAAALEYLDAAVEAVLAGTAPQRLMVLDYEPRDPDAKTRLDDARSRLADAGVRVDTLDDVIAAESSAPSVPLHIPAADDDPVLALIYTSGSTGTPKGAMYTDSMLNRTWLRPSQAPVINVNYLPMSHMYGRGTLAYALANGGTCHFAAKSDMSTLFDDIRLVRPTELSLVPRVVELMYQHFLRQRDRLLSAENPSDDVEQDLKREIRNSDFGGRVLSANTASAPLAPELRSFVETCLGVRLHTTYGSTEMGGVLVDNMINRANVIDYKLVDVPELGYFTTDKPFPRGELLIKTRTMTPGYYRRPEATASTFDEDGFYRSGDVMALVGPDELRYLDRRNNVMKLSQGEFVAVAQLENAFTTSPLIHQMFIYGSSAEAFLLAVVVPDRDVIARIDSLGMAQIKRLIAESLHQIAAQRHLNGYEVPRDFLIETEPFSVENGLLTGAAKMARPQLNRRYGPRLDDLYAQLRAAQASELQALRADARQAPVLDTVLRAAAASIGLSRSGVGRDSKFTDLGGDSLSALNFSQLLEEVLDVTVPVGVVIDPTADLERVARYIEAQRTPEANTRPNFTAVHGRDAAEIQACDLMLDKFIDIQTLTDATRLRKPSTAIQSVLLTGVTGFLGRFVCLNWMQRLADTGGKVVCLVRGADAIEARRRIDEAVGTDPALRERFQTLADDHLEVLVGDLGSPNVGLSQAEWDRLAGEIDLIVHPGAHVNHMLPYSQLFTANVVGTADLIKLAMTAKLKTFHYVSSIGAALTEDGTVDEDADMRTACPKRSMITNEYAGGYAASKWAAEVLMREAHDLCGLPVVVFRPDMIMADSRYVGQINSPDLITRLLFSLIVSGIAPRSFYRGQHCGQVRPHFDGLPVDFVAKVVSEVGAQCTTGYHTYNIVNPHDDGVSLNDFVDWLIAAGNPIVCVDDYDAWLSRFEIALRGLPDKQRHQSVLALLDVYRHPLEPTHGSAAPCTRLEQAVRAMGAEIPHLSAELIEKYSAGLRLMGLV

SEQ ID NO: 232 - protein, 1171 aa, Artificial Sequence
  Mycobacterium ahvazicum
MAFVGRSDVKDPGAQQDQWERLARRRERLYAEDAQFSATRPDEHIAAAARAPGLRIGEVMATVLQGYADRPALGQRVREVTTDPATGRSTVNFLPRFETVSYAELWARVQAVAGDWHHHGRHPLRTGDFVCVLGFASIDYTAIECACIHLGAVVVPLQTSAPAAQHAPILDETQPRIFAVGIDNLEIAVEAVLAASRTGTAPQRLIVFDYEPRDDDQRASYEAARDRLAATGTGLTIETLDNVVAQGQSLPAPPLHVAAADEDPLAWVFYTSGSTGTPKGAMFTESLCIGTWLAQSDQPVITLSYMPMSHLIGYGYVILTLANGGTSYFAARSDLSTLFDDLALVRPTSMSLVPRVCEMFYHHYQRELDRRSLTGEASDEAADELTTAIREQILGGRVLAVGCGSAALSPEIKEFMEVVLDQHLLIGYSSTEIAGRMIVADEHVLRPPVIDYKLLDVPELGYFSTDKPYPRGELAVKSARFMAGYYNRPDLTATMFDADGYYKTGDIMAEVGPDRLRYVDRRNNVIKLAQGEFVAVSRLEALYSTSSLIHQIYIYGNSERSFLLAVIVPIDTGVGTSLIADSLRQIARDNGLNGYEIPRDFLIETEPFSLTNGLLSGVGKFLRPRLKERYGERLEQLYAAMADDQLGQLRALRTGGADQPVLATVSKAVQATLGVPAADVSPEARFIDLGGDSLSALTFSTLLADIYGVEVPVGVVIDPTGDLLRITDHIERQRNSDVPRPTFGSVHDTAGREVSACDLRLDKFIDDDILKNAMLLPAPTSEIRTVLLTGSTGFLGRFLGLEWLQRLADSGGTLVCLTRGADAAHARRRIEAALDSDPKLLDRFRSLAEGHLEVVAGDIGEAGFGIDDATWRRMSETVDLIVHPAAHVNHVLPYRQLFGPNVVGTAEVIRLAITTKLKPVHYISTLGVSAVAHQLVDEDTDIRRSVPECVADDSYANGYGISKWAGEVLMREAHDLCGLPVAVFRPGMILADSRYAGQLNVPDIFTRLLFSLVTTGVAPRSFYRTGAARPHYEGLPVDFLAESIAAIGPRHGSGFATYNTTNPYDDGISMDTFVDWIIAAGYPVERIDDYSSWLTRFETAMGALPERQRAQSVLTVLDVYREPMLAIAGSPVPGAQFQSAVAHSGRAIPHVTQQLIEKYLADLEQIGILSR

SEQ ID NO: 233 - protein, 1167 aa, Artificial Sequence
  Mycobacterium colombiense
MAFVGRSDVKDPGAQQDQWERVARRRERLYADDAQFRNTKPDDEIAAAARAPGLRIAEVMATVLQGYAGRPALAQRAREVVTDPATGRSLLHFLPRFETITYTDLWARVQATAADWHHHQRHPVRAGDFVCVLGFASIDYTALECACIHLGAVVVPLQTSAPAAQHAPILAETRPRILAVGIDNLASAVEATLAGTAPDRLIVFDYEPGDDDQRAGFEAAVARLSGAGSALTIETIDAVATHGAVLPPAPLHVAPEGEDPLAWVFYTSGSTGTPKGAMFTESLCIGTWLAQSDQPVITLSYMPMSHLIGYGYVILTLANGGTSYFAAKSDLSTLFEDLALVRPTSMSLVPRVCEMFFHHYQRELDRALMAGADPDAAGAQITTAIREEILGGRVLAVGCGSAALSPEIKEFMEEVLDQHLLIGYSSTEIAGGMIVADEHVLRPPVIDYKLLDVPELGYFNTDKPYPRGELAVKSARFMAGYYNRPDLTATMFDEDGYYKTGDIMAEVGPDRLRYVDRRNNVIKLAQGEFVAVSRLEALYSTSPLIHQIYIYGNSARSFLLAVVVPTDVGADPSAIAQSLRQVARDNQLNGYELPREFLIETEPFSLANGLLSGVGKFLRPKLKARYGDRLEELYARIADDQRGQLRVLRTGGADQPVLSTVTKAVQATLGVAAADVSPEARFIDLGGDSLSALTFSTLLADIYGFEVPVGVVIDPTGDLLTIAGHIERQRAPGTGRPTYASVHGASATEVHAEDLTLNKFIDDDILKSATLLSQPTAEVRTVLLTGATGFLGRFLAMEWLEGLAESGGTLICLTRGADATQARQRIEAVLGSDSALLERFRALAADHLEVVAGDIGEPRFGLDEATWRRLVDTVDLVVHPAAHVNHVLPYRQLFAPNVVGTAEIIRLAITRRLKPIHYVSTLGVSAVAHQLVDEDTDIRRSVPSCTIDDGYANGYGISKWAGEVLMRETHDLCGLPIAVFRPGMILADSRYAGQLNVPDIFTRLLFSLVTTGVAPRSFYRGGGGRPHYEGLPVDFLADAIAAIGPQHGSSFDTYNTTNPHDDAISLDTFVDWIIAAGYPVEKIDDYSAWLARFETAMRALPENPRGQSVLAVLDVYREPMAAVSGSPVPGERFRAAVRAAGRAIPHVSRELIDKYLADLQRIGVLTR

SEQ ID NO: 234 - protein, 1131 aa, Artificial Sequence
  Clavibacter michiganensis subsp. michiganensis NCPPB 382
MSTEQMGTEQMGSQHEDTSIEAIFAQHADRTALRQRSGPDITDMGFRELWDRAGALAAALGETVSAGDRIAVLGTATADAVTLDLAAWILGAVSVPLQASAPVAALRAIVEETTPVWIAATADQAATARAVAEASGDGIRTMRLDTDTDADTDTDAALTLGALVARGAGLRRRSPWHPAPGDDPLALLLYTSGSTGTPKGAMYTRSMVERMWHALRPDPAAPADASTTADDGDAAAIVGYAYLPMSHLTGRSSLLATLGRGGTVALATSTDLSTLFDDLRTFAPTEFVFVPRVAELVRQEGDREEQRRLTAGSTDRDAVRAEVQADLRARAFGGRIHRAICTSAPLTPELRTYIEGCLGLTLHDLYGSTEAGGILHDGVIQQPPVTEHKLVDVPELGYRTTDRPHPRGELLVKSASVIAGYFRRPDVTAAVFDEDGFYRTGDVMAQTGPGTYEYVDRRNNVIKLSQGEFVAVASLEATYGGTPEVHQIALHGDSRHAFLVAVVVPADPAASERDILAALQRTAREHGLAPYEVPRGVIVEPDPFTVDGGMLSDAGKLLRLRLTQRYGERLAALYDALEEQQSGTLVAALRERADDEPTVDTVVRAALLLLGAEVSPATAAAARFSDLGGDSLSALTFSGILEDVFGTEVPVGVLTDPTNDLAAVAAYVERSASDDRPTVTRVHGAGASTLRVGDLRLDRMLGGIPTPVPRASAARPGSRTVLLTGANGYLGRFLAIDWLERLAATGGTLVCIVRGADDADARRRLEAAFAADPAFARRFAELSGSLEVLAGDVSEHRLGLDDERWIDLAARVDLVAHAAALVNHVLPYSALFGPNVVGTAEAIRLAIAAGSVPVTFVSSVAVAGGARPGATADAEPSAPGALDEHADIRATIPEWAVGDEYANGYGASKWASEVLLREAHEHHGVPVAVFRSDMILAHPRWRGQVNLPDVFTRLIWSVLTTGLAPASFVRRGPDGERQRSHYDGLPADFTAAAIDGIGAALTEGHRTFNVVNPHDDGVSLDTFVDWIREDGHDIARVDDHAEWVDRFRAALGALPDADRARSVLPLMHAFASPEEPHAGSAIPADAFAEAVRAVRPLGSPDIPSLDHALIAKVADDLAFLGLLAPARAAAA

SEQ ID NO: 235 - protein, 1165 aa, Artificial Sequence
  Mycobacteroides abscessus subsp. bolletii 50594
MTDAAALAAKLVESDPQFQAAIPDPEVMDSLLVPGLRLSQVLHALLTGYADRPVMGFRSRESVVDPATGRTVDRLLPAFETITYGELRENISAILAEWQHGPNAMGADDFVATIGFSSPDYVTLDLATLMNGSVSIPLQHNASAAQLRMMLEETSPRLVAASADSLDLAVEAALGLTELRRVVVFDYRPDTDDHREKLAAARGRLREAGMNVVVESLADVIAKGRQLPEPVLYTAGDDQRTALIMYTSGSTGAPKGATFTEWTVTRFWSSGAAPNRDTPIINVNFLPLNHLAGRVGLLTAFIPGGTCYFVPESDLSTLFEDWQLVRPTHMGVVPRVVDMLFQHYQTRVDALIAEGADATSADHTAKTELREDVLGGRVVAGLLATAPLSPEMKTFLESSLNFHLLDLYGLTEVGGVFRDGKISRPPVLDYKLADVPELGYYTTDKPHPRGELLVKSATATPGYYKRPDVTAEVFDADGYYRTGDVMAEIAPDELVYVDRRNNVIKLAQGEFVAVANLETVYVGAPLVRQIFIYGNSERAYLLAVIVPTEETLQRYTNSPIDMKNSIRESLQRTARANHLHSYELPADFIIETTPFTIESGMLAAVGKPIRPKMIEHYGGRLEQLYADLAEARVQELRLLRDTAQQRPIIETVTEAAQALLGMSSDAVRPDHHFIDLGGDSLSALTFSNLLRDLFDVDVPVGVITGPAADLRKLAAYIETARESNVATAASVHGPDAAVINADELTLDKFIDAETLGNASTLPAPSGAVHTVLLTGANGYLGRFLCLEWLQRLAPSDGQLICLVRGDDNDDALARLEAAYGDTDQALLDEFRALARRHLRVVAADIAQPRLGLGDATWEQLAREVDKIVHPAALVNHVLPYNQLFGPNVFGTAEVIRLALTTRMKPVTYLSTMAVAMAVPDFDEDGDIRTVSPARHIGAGYANGYANSKWAGEVLLREAHDLCGLPASVFRSDMILTHRLYSGQLNVTDAFTRMLLSLVLTGIAPRSFYQGGSEGDRPRAHYEGLPVDFVTEAITTLGLANSEGFRSYDVMNPHDDGISVDTFVDWLIEDGHIIDIIDDYDEWLSRFETALRGLPDELRRSSVLPLLDAYRAPGHPRRGADISTDMFRKAVRDNKIGSDGDSADIPHIDRALISKYISDLRAHGLL

SEQ ID NO: 236 - protein, 1187 aa, Artificial Sequence
  Mycolicibacterium rhodesiae JS60
MTTELRIDTDDVDAHNIQRPGGVGERVTYLYENDRQFRAASPRLDVLDAARKPGLRLSQVLRTLAEGYSDRPAVGTRAVQTIGDELTGRCATQLLPAFNTISYGELWSRVQAVANAWHHDTQAPVEAGDFVATIGFSSADYLTIDLVCGYLGLVAVPLQHNTSASRLVPILEESAPRVLAVSADYLDLAVEAALGSGWLSRLVVFDYRPQDDNHRDRVQHARDSLAGAGMEVIVETLPDIIARGTRAPEAPLFTDGSDDRLAMILYTSGSTGAPKGAMWTERMVRTLWTIPMKSTESVVINLNFMPLNHLGGRLPLAASFQTGGTSYFVAESDLSTLFDDWMLVRPTDLGLVPRVVDMLYQRYQQIVDRLSADGLDLDTAERTAKTEIRETLLGGRVLGGFVSTAPLSAEMRLFLESCLQADIVDTYGLTEIGAVTTDGLVVRPLVLDYKLVDVPELGYFSTDKPHPRGELLVKSAAAMPGYYKRPEITAEVFDADGYYRTGDIVAELEPDRLAYVDRRNNVIKLSQGEFVAVANLEAEFARTPLIRQIYVYGNSERSSLLAVVVPTEEALAVHGGVNDQLRAAVRAAMSQTARDAGLQPYEVPVDFLIETEPFSVADGLLSGVGKLLRPKLKERYGAELEALYDQVDAARADDVRALRDAAQHQPVVDTVIQAAAALLGIPSASVTRDDHFIDLGGDSLSALTFSNLLQELFGIETPVGTLTGPTTTLGDVASHLEQGAGDGVARPTATSVHHSDTTIHAADLTLDKFLPANLLDDARALPLPVDAEPHTVLLTGANGYLGRFLALEWLQRLAQTGGTLICLLRGSDNESARMRLEQIFDDGDAQMSERFHDLAAEHLEVIAGDISQPQLGVDPQTWDALTQRVDLIVHPAALVNHVLPYRQLFGPNVVGTAEVIALALSSRLKPINYLSTVSVAMTVEPERFEEDGDIRTISPTRPIDDSYANGYGNSKWAGEVLLRQAHDLCGLPVSVFRSGMILADRRYDGQLNVSDMFTRLIYSLVRTGLAPESFYQRSESGERTRSHYDGLPVDFVAESITTLGAGARRGFRSYDVMNPHDDGISLDVFVDWLIETGHSITRVDDYDDWLSQFDSALRALPDAQRQQSVLPLLTAYSRPERPLLGSLAPAQVFRKAVQENRIGADQDIPHLSRQLIEKYVSGLRGQDLLPN

SEQ ID NO: 237 - protein, 1164 aa, Artificial Sequence
  Mycobacteroides immunogenum
MTAGTAARVAELFESDPQFRAAMPDPEVMDSLLVPGLRLSQVLHALLSGYADRPVMGFRSRESVIDAESGRTVDRLLPAFETITYGQLLANISALLAEWQHGTVPIGAGDFIATIGFSSPEYVTLDLAALMNGSVSIPLQHNTSAAQLRMMLEETNPRLIAASANCLDLAVEAAIGLTDLRRLVVFDYRAETDDHREKLTTATERLKSAGIEVVVEPLADVIAAGRDLPEPVLYTDGDDQRTALIMYTSGSTGAPKGAMFTEWTVTRFWSSGAAPNRDTPIINVNFLPLNHLAGRVGLLTAFIPGGTCYFVPESDLSTLFEDWQLARPTHMGVVPRVVDMLFQHHQTRVDALMAEGADADTADRLAKTELREDVLGGRVVAGMLATAPLSPEMKAFLESSLDFHLLDLYGLTEVGGVFRDGKISRPPVLDYKLVDVPELGYYTTDKPHPRGELLVKSATATPGYYKRPDVTAEVFDADGYYRTGDVMAEIAPDQLVYLDRRNNVIKLAQGEFVAVANLETVYVGAPLVRQIFVYGNSERAYLLAVVVPTEEALRVHPDPVELKNSIRESLQRTARANHLHSYELPADFIIETAPFTIESGMLAAVGKPIRPKMIEHYGQRLEQLYVDLAEARVQELRQLRDTARQRPVIDTVTEAAQALLGMSADAVRPDHHFLDLGGDSLSALTFSNLLRDLFDVEVPVGVITGPAADLRKLAAYIKQSERAAPATAASVHGPNTGVIRADELALDKFLDAETLRNATQLDAPSGAVNTVLLTGANGYLGRFLCLEWLQRMAQTDRQLICLVRGADDDEALARLEAAYGETDRALLDEFRALARRHLRVIAADIAQPRFGLADTDWAQLARDVDKIVHPAALVNHVLPYNQLFGPNIVGTAEVIRLALTTRMKPVTYLSTMAVAMTVPDFDEDGDIRTVSPTRHIGPGYANGYANSKWAGEVLLREAHDLSGLPVSVFRSDMILTHRRYTGQLNVTDAFTRMLLSLVLTGIAPRSFYRGGDDGIRPRAHYEGLPVDFVTEAITSLGLSATEGFRSYDVMNPHDDGISVDTFVDWLIEDGHSIDIIDNYDEWLSRFEIALRGLPDELRRASVLPLLDAYRVPGDPRRAAATPNHVFRKAVQENKIGGESADIPQIDRALIAKYIGDLRAHGLLR

SEQ ID NO: 238 - protein, 1162 aa, Artificial Sequence
  Mycobacteroides saopaulense
MTAGAAARAAELFESDPQFRQALPDPDVMDSLLVPGLRLSQVLHALLTGYADRPVMGFRSRETVIDPASGRAVDRLLPAFETITYGRLLENISAILAEWQHGTDAIGAGDFVATIGFSSPDYVTLDLATLMNGSVSIPLQHNASATQLRAMLEETDPRLIAASADCLDLAVEAAMGLSNLRRVVVFDYRPDTDDHREKLAAARARLDAAGMEVVIEPLAQVIAKGRELPEPVLYTDGDDQRTALIMYTSGSTGAPKGAMFTEWTVTRFWSSGAAPNRDTPIINVNFLPLNHLAGRVGLLTAFIPGGTCYFVPESDLSTLFEDWQLTRPTHMGVVPRVVDMLFQHYQTRVDALVAEGADADTADRLAKTELREDVLGGRVIAGMLATAPLSPEMKTFLESSLNFHLLDLYGLTEVGGVFRDGKISRPPVLDYKLVDVPELGYYTTDKPHPRGELLIKSATATPGYYKRPDVTAEVFDADGYYRTGDVMAEIAPDELVYVDRRNNVIKLAQGEFVAVANLETVYVGAPPVRQIFVYGNSERAYLLAVVVPTEEALRAHPDPIELKNTIRESLQRTARANHLHSYELPADFIIETTPFTIESGMLAAVGKPIRPKMIEYYGDRLEQLYVDLAEARVQELRQLRDTAQLRPVIETVTEAAQALLGMSADAVRPQHHFIDLGGDSLSALTFSNLLRDLFDVEVPVGVITGPAADLRKLAAYIEHERESSTATAASVHGPDAPNISAEELTLDKFIDAETLRNASELDMPTGAVNTVLLTGANGYLGRFLCLEWLQRLAPTDGRLICLVRGDDDDDARARLEAAYGETDQALLDEFRNLARRHLRVIAADIAQPRFGVDDATWEQLTHDVDKIVHPAALVNHVLPYNQLFGPNVFGTAEVIRLALTTRLKPVTYLSTMAVAMTVPDFEEDGDIRAVSAVRTVDDGYANGYANSKWAGEVLLREAHDLCGLPTSVFRSDMILTHRRYSGQLNVTDAFTRMLLSLVLTGIAPRSFYQGDGNGSRPRAHYEGLPVDFVAEAITTLGLATAEGFRSYNVMNPHDDGISVDTFVDWLIDDGHAIDIIDGYEEWLSRFETALRGLPDEQRRASVLALLDAYRAPGHPRRGAAIPTDVFRKAVQDHEIGDHNDIPQIDRALIGKYLSDLRAHGLL

SEQ ID NO: 239 - protein, 1175 aa, Artificial Sequence
  Rhodococcus sp. 06-412-2C
MTHTLAVDSRQDRETRQRSRFQELHESDQEFRAAEPDSSVADAAQELAPNLARVVAEIMTRYSDRPALGSRARQITRVDDANVLHLLPRFDTVTYGEVWKSAGALASALTHDSVGIAPGDFFATLGFASADYVIAELATIRLGAVAVPLQAGTSAGQLSAIADEVEPVVLAADVDNLSVAVQVAGQCRSIRRIVVLDYDAEVDVHTRIMKSARDDAEQAGVVIRPLTELIRDGEQLPEIPLPDAEDPDRLATLIYTSGSTGTPKGAMHTERIVCGAWTGAWHHTGASSESVDRPAFPVITLDYLPMSHLAGRGLVFSALAAGGTVHFAGASDLSTLFEDFALARPTMALLIPRVCEMIRHNVLAEIDREVDRSSGGDEDSVRRDVLERHRNDRFGGRILAAMVGTAPIATEVKDFVTELLDIQVRDNYGSTEAGMVLHDGVIARPPVIEYKLDDVPELGYFSTDTPHPRGELLLKTSSIIPGYYKRPDVTADVFDSEGFYRTGDVVAEIEPDRLAYVDRRKNVLKLAQGEFVALARLEAVFGTSDLVDQIFLYGNSQRAYLLAVVVPSHPDTTTASIIESLQEIARTESLNSYEIPRDVTIEHQPFTQENGLLSGAGKQLRPKLVERYGADLERRYVDLESGQNERIRELRRHGADAPVLTTVGDAAQALLGCDGSDVRPDAHFSDLGGDSLSALTFSTLLRDIYGVDVPVGVITGPAMDLSALADYITSARDNDSDTATFASVHGRDATVAHASDLRLAAFLDETLLDTAHHVAGPRTRTETVLLTGANGYLGRFLCLEWLERMAEVGGTVVCLVRGRSDSDARSRLDAAFDSGDEKLSAHYRALADSTLEVVAGDLGTPRFGLDDDEFAALAERVDRIVHPAALVNHALPYEHLFGPNVVGTAEVIRLALTDHVKPVTYLSTVAVAVGVDNFRENGDIRIDSPSRAVDDSYANGYGNSKWAGEVLLRNAFDEFGLPVSVFRSDMILAHSTWSGQLNVPDVFTRLILSVVATGLAPRTFYATGTGAPTDDSGRPLAHYDGLPADFSAEAITSIAGADVSGYRTFDILNPHDDSISLDTFVDWIREAGRDIEIVANYDEWFERFSAAVEALPEKQRSHSLLPLIQSYAQPQQPSSGAMLPADEFAAAVGEIPHLGRGLIEKYLSDLEVLGLVVKR

SEQ ID NO: 240 - protein, 1182 aa, Artificial Sequence
  Mycobacterium sp. 1482292.6
MASDATRQLGAPADSNEERRARRIRELCASDPQFRSAMPIPQVLEAARQPGLRLPQVIETLVEGYAGRPMFGQRARQQVTDPQTGRTSSRLLPSFTTLTYGELWARARAIATAWCRNTHYRLSPGDFVATVGFASSDYVAIDVACAYAGWVSVPLQHNASVAQLRSILSEAKPRVLAVSAEYLDTAVQAALGGEWLRHLVVFDYLPVVDDHQESYERALALLHAAVMPVQVQTLNEVISQGSALPAEPAYLGADEARLAMILYTSGSTGAPKGAMYTEAMTSRLWTMSFPAEPDAAVFSVNFLPLHHLGGRIALLACIRAGGTTYFAAGPELSTLFEDWALVRPTELYVVPRVIEMLIQRFRTGVDRLRLEGADDETAQAQAADELRQQLLGGRVLGGFIGTAPLATEMRTFIESRLQVHLVDGYGLTEVGGITKDGVVLRPPVVKYKLVDVPELGYFRTDKPYPRGELLVKSTTSTPGYYNHPEITAAVFDEDGFYRTGDVMAEVGPDHLVYVDRRNNVLKLSQGEFVAVANLEALYATAPLIRQIFVYGNSERSSLLAVIVPTVEALAHFDGDLTALKSALRDSLRETAKASQLQPYEIPVDYLIETEPFTTANGLLSGVGKLLRPNLNDRYGERLELLYIELAALQQDKLGALHRLADDLPVIEIVIRAVGLLLGTDPVDRNDHFTDLGGDSLSALSFSTLLQEIFGVEVPVGVLIGPANSLQELANFIETQRQSSSERASFTRVHGRAAEYLHASDLTLDKFIDTKTLDRAAALSIPAVGEPRTVLLTGATGYLGRFLCLEWLQRLACSGGKLVCLLRAGSTNTAQVRLNAVFDTGDPVLLRRFHELAADHLDVVVGDMSEPDLGLDEATWDRLAQTVDMIVHPGALVNHVLPYEQLFGPNVVGTAALIRLAITQRMKPVNYVSTVAVSMSVPDGEFIEDGDIRVVSPVRPNNGSYANGYANSKWAGEVLLRNAHDRYSLPVNVFRPDMILAHSEYLGQVNVVDAFTRLVFSLLVTGIAPQSFYQKRNGEFRPRAHYDGLPADFVAESICKLSGQLRDGFHSFDVLNPYDDGISLDVFVDWLIASGHSITRIPDYHEWLTRFRTAMTALPERQRQYSVLALLEAYHQPQAPLRGAPVPTEVFHAAVRATKVGPDKDIPHIGRPLIDKYITDLRHLGLL

SEQ ID NO: 241 - protein, 1181 aa, Artificial Sequence
  Rhodococcus sp. PBTS 2
MTRTIAMKSTVAVDSEHDRDIRQRDRFQHLHDSDPEFRAAEPDRSVADAARELAPNLARVVAEIMTRYADRPALGRRARTIEDTDGSTTARLLPRFDTVTYGQAWADAGALASALGHDDGGIAAGDFVATLGFAGIDYVITELATIRVGAVAVPLQAGATAGQLRAIVDEVEPVVLASDVDNLAVAMEVAGHCRSIRTVVVLDYDDRIDADTRALTSAREGVHGSGIAVRPLTELVDEGSRLPQVPLFDVEDPERLAALIYTSGSTGTPKGAMHTEQIVSGAWTGAWHRTGASSEGVDEPAFPVITLDYLPMSHLAGRGLVFSTLAAGGTVHFAGSSDLSTLFEDFALARPTLALLIPRVCEMIRHTVLAEIDRAVDGTDAGEHEQISRGVLERVRSEQFGGRILAAMVGTAPIAAEVKDFVTDLLDVRVRDNYGSTEAGMVLLDGIVARPPVLEYKLDDVPELGYFSTDTPHPRGELLLKTTSIIPGYYKRPDVTADVFDSDGFYRTGDVVAELEPDRLAYVDRRKNVLKLAQGEFVALARLEAVFGTSELVDQIFLYGNSQRSYLLAIVVPAHANSTAGAIMESLQRIARTESLNSYEIPREVVLEREPFTQDNGLLSGAGKQLRPKLVERYGDELERRYAELESGQTDRLRELRRSGAQAPVLATVGDAAQALLGCSGADIRPDAHFTDLGGDSLSALTFSTLLRDIYDVDVPVGVITGPAMDLAALADYITSAIDNDSDTATFASVHGRDASVALASDLTLSAFLDASLLDAAHRIPGPRPVTNTVLLTGANGYLGRFLCLEWLEKMAAAGGRVICLVRGRSDADARGRLDAAFDSGDATLSDRYRALADAALDVIAGDLGTPRFGLTDDVWEELSRRVDRVVHPAALVNHALPYEHLFGPNVVGTAEVIRLALTDHIKPVTYLSTVAVAVGVDDFHENGDIRVDSAQRAVDETYANGYGNSKWAGEVLLRNAFDEYSLPVSVFRSDMILAHSTWSGQLNVPDVFTRLILSVVATGLAPRSFYATDTGAPTDEQGRPLAHYDGLPADFSAAAITSIAGDDVAGYRTFDILNPHDDDISLDTFVDWLREAGCTIDIVDDYDEWFERFSAAVQELPEKQRSHSLLPLIHSYAHPQHPSSGAILPAEEFASAVGDIPHLGRELIEKYLADLVALGLVAKS

SEQ ID NO: 242 - protein, 1173 aa, Artificial Sequence
  Mycolicibacterium smegmatis
MTSDVHDATDGVTETALDDEQSTRRIAELYATDPEFAAAAPLPAVVDAAHKPGLRLAEILQTLFTGYGDRPALGYRARELATDEGGRTVTRLLPRFDTLTYAQVWSRVQAVAAALRHNFAQPIYPGDAVATIGFASPDYLTLDLVCAYLGLVSVPLQHNAPVSRLAPILAEVEPRILTVSAEYLDLAVESVRDVNSVSQLVVFDHHPEVDDHRDALARAREQLAGKGIAVTTLDAIADEGAGLPAEPIYTADHDQRLAMILYTSGSTGAPKGAMYTEAMLARLWTMSFITGDPTPVINVNFMPLNHLGGRIPISTAVQNGGTSYFVPESDMSTLFEDLALVRPTELGLVPRVADMLYQHHLATVDRLVTQGADELTAEKQAGAELREQVLGGRVITGFVSTAPLAAEMRAFLDITLGAHIVDGYGLTETGAVTRDGVIVRPPVIDYKLIDVPELGYFSTDKPYPRGELLVRSQTLTPGYYKRPEVTASVFDRDGYYHTGDVMAETAPDHLVYVDRRNNVLKLAQGEFVAVANLEAVFSGAALVRQIFVYGNSERSFLLAVVVPTPEALEQYDPAALKAALADSLQRTARDAELQSYEVPADFIVETEPFSAANGLLSGVGKLLRPNLKDRYGQRLEQMYADIAATQANQLRELRRAAATQPVIDTLTQAAATILGTGSEVASDAHFTDLGGDSLSALTLSNLLSDFFGFEVPVGTIVNPATNLAQLAQHIEAQRTAGDRRPSFTTVHGADATEIRASELTLDKFIDAETLQAAPGLPKVTTEPRTVLLSGANGWLGRFLTLQWLERLAPVGGTLITIVRGRDDAAARARLTQAYDTDPELSRRFAELADRHLRVVAGDIGDPNLGLTPEIWHRLAAEVDLVVHPAALVNHVLPYRQLFGPNVVGTAEVIKLALTERIKPVTYLSTVSVAMGIPDFEEDGDIRTVSPVRPLDGGYANGYGNSKWAGEVLLREAHDLCGLPVATFRSDMILAHPRYRGQVNVPDMFTRLLLSLLITGVAPRSFYIGDGERPRAHYPGLTVDFVAEAVTTLGAQQREGYVSYDVMNPHDDGISLDVFVDWLIRAGHPIDRVDDYDDWVRRFETALTALPEKRRAQTVLPLLHAFRAPQAPLRGAPEPTEVFHAAVRTAKVGPGDIPHLDEALIDKYIRDLREFGLI

SEQ ID NO: 243 - protein, 1173 aa, Artificial Sequence
  Mycobacteroides sp. H092
MTAHTQANYDTDAAALATKLFESDPQFRAARPDPEVMDSLLVPGLRLSQVLHALLTGYAERPVMGFRSRESVADPATGRTVDRLLPAFETVTYGQLLDNISAILAEWQHGENRIGADDFVATIGFSSPDYVTLDLATLMNGSVSIPLQHNASVTQLRMMLEETNPRLVAASADCLDLAVEAALGLTDLQRVVVFDYRPDTDDHREKLAAARERLQAAGMRVVVEPLAEVIANGRRLPEPVLYTAGDDQRTALIMYTSGSTGAPKGAMFTEWTVTRFWSSGAAPNRDTPIINVNFLPLNHLAGRVGLLTAFIPGGTCYFVPESDLSTLFEDWQLARPTHMGVVPRVVDMLFQHYQTRVDALIAEGAEAKSADRTAKAELREDVLGGRVVAGMLATAPLSPEMKTFLESSLNFHLLDLYGLTEVGGVFRDGKISRPPVLDYKLIDVPELGYYTTDKPHPRGELLVKSATATPGYYKRPDVTAEVFDADGYYRTGDVMAEIAPDELVYVDRRNNVIKLAQGEFVAVANLETVYVGAPLVRQIFVYGNSERAYLLAVIVPTEEALRAHPDPVDLKNSIRESLQRTARVSHLHSYELPADFIIETTPFSIESGMLAAVGKPIRPKMIEHYGDRLEQLYADLAEARVQELRQLRDTARQRPVIETVTEAAQALLGMSSDAVRPDHHFIDLGGDSLSALTFSNLLRDLFDVEVPVGVITGPAADLRKLAAYVEGARESGAATAASVHGSDVTVINANELTLDKFVDAETLSSAAELERFSGAVGTVLLTGANGYLGRFLCLEWLQRLAQSGGQLICLVRGDDDDDALARLEAAYGHTDQALLDEFRALARRHLRVIAADITQPRLGIDDATWEQLAREVDKIVHPAALVNHVLPYNQLFGPNVLGTAEVIRLALTTRIKPVTYLSTMAVAMAVPDFDEDGDIRTVSPIRHIGPGYANGYANSKWAGEVLLREAYDLCGLPVSVFRSDMILTHRQYSGQLNVTDAFTRMLLSLVLTGIAPRSFYQGDGDGSRPRAHYEGLPVDFVTEAITTLGLANSEGFRSYDVMNPHDDGISVDTFVDWLVEDGHTIDIIDDYDEWLSRFETALRGLPDDQRRSSVLPLLDAYRAPGHPRRGADTPTDQFRKAVQNYKIGSDDDSADIPHIDHALITKYISDLRAHGLL

SEQ ID NO: 244 - protein, 1164 aa, Artificial Sequence
  Mycobacterium colombiense
MDAHDEEFRTTKPDSALQLAAREPGLRLPQILEIFAEGYADRPALGWRARSLTTDQATGRTSAQLLPRFDTLTYRELWANVRAIAGAWRHDATNPVAPGDVVATVGFASAEYLTIDLVCAYLGLVAVPLQHNTTASRLRPIVEEVEPSTLAAGVGYLDLAVQAALGSSSLRRVVVFDYRPEVDEQREAVQRAQAKLAGAGAAVTIETLDDVIERGRTLPPEPMFTGDTDERLAMIMYTSGSTGLPKGAMYTERMLCRLWTNELMPDFTDTPVINVNFMPLNHLGGRIPLSTAFQAGGTSYFVPESDLSTLFDDWNLVRPTEMGLVPRVAEMLYQRYQSAVDRFEIAGADTAAAQAQAQTELREQVLGGRIVTAFCGTAPLAAEMRSFIETCLDVHVLDGYGLTEVGMVTKDGRINQPPVLGYKLIDVPELGYFLTDKPYPRGELLVKSLTAMPGYFKRPDVTTKAFDPEGYYRTGDVMAELEPGRLAYVDRRNNVLKLAQGEFVAVARLEAVFSSAALVRQIFVYGNSERPYLLAVVVPTDDAAERFAGDADGLKAALAESLRQSAKLAELQSYEVPVDFVVETEPFSEDNGLLSGVGKLLRPKLKEHYGARLEQLYAELAENRVTELRALREGAADHPVIFTLSRAAEALLGLAGGPPAPDALFIELGGDSLSALTFSNLLRDIFDVEVPVGMITGPATDLGQLAEYVESERVSGSRRPTFATVHGRSATQVRAADLTLDKFIDATTLAEAPALPRATGTPHAVLLTGANGYLGRFLILEWLERLAETGGKLISVIRAADTAAATKRLEAVFDSGDPQLLQRFRRLAAEHLEIIVGDIGEPNLGLEQGTWERLAQSVDLIVHPAALVNHVLPYDQLFGPNVVGTAELIRLAITTRIKPVTYMSTVAVALSVDPAAFAEDGDIRTVSALRPVDDSYANGYANSKWAGEVLLREAHDLCGLPVAVFRSDMILAHSRYAGQLNVPDAFTRLVFSLLTTGIAPASFYQTDPQGNRPVAHYDGLPADFVAEAVTTLGEQIASAAEDSGAYRSFDVMNPHDDGISLDVFVDWLIAAGHDIRRIDDYDEWLGRFTTALRALPDTQRQHSVLPLLDAYRKPETPLRGAPAPTDVFRSAVRSAKIGADEDIPHLSAALIDKYVADLRLLGLV

SEQ ID NO: 245 - protein, 1188 aa, Artificial Sequence
  Mycobacterium sp. TKK-01-0059
MAGDAKHTKVSSRGPARERVADRIRELAATDEQFRNAEPDPALQRAARQPGLRLPQILELFVEGYADRPAVGWRARTLHTDPATGRTTTRLLPRFDTMTYRELWDDVRAIAAAWRHDAANPVSPGDFVATVGFASAEYLTLDLVCGYLGLVAVPLQHNTTASRLRPIVDEVEPSILAAGVGYLDLAVEAAAGSPSLRRLVVFDYQPEVDEQREALQRAEARLAAAGAAVTIETLDEIIERGRALPPEPMYTGDTDQRLAMIMYTSGSTGLPKGAMYTEQMLAKVWTNELMPDFADTPVFNVNFMPLNHLGGRIPLSTAFQAGGTSYFVPESDLSTLFDDWNLVRPTEMGLVPRVAEMLYQRYQSAVDRLVASGADAGSAESRARDELREQVLGGRIVTAFCGTAPLAAEMRAFVETCLDVHVLDGYGLTEVGMVTKDGRMTRPPVLDYKLIDVPELGYFHTDKPYPRGELLVKSLTATPGYFKRPDVTANAFDPDGYYRTGDVMAELEPDRLAYVDRRNNVLKLAQGEFVAVARLEAVFASAPLIRQIFVYGNSERPYLLAVVVPTADAAERFGGDPEGLKAALAESLRQSAQLAELQSYEVPVDFIVETEPFSEDNGLLSGVGKLLRPKLKERYADGLEQLYAELAENRVTELRALREGADKHPVIFTLTRAAEALLGVAGGPPEPDALFIELGGDSLSALTFSNLLRDIFDVDVPVGMITGPATDLGQLAEYVESERKSGSRRPTFATVHGRGAAEVRAAELTLDKFIDAKTLAVAPTLPRATGTPHTVLLTGANGYLGRFLALEWLERLAETGGKLVSIIRATDTATAVKRLEAVFDSGDPQLLERFRTLAAEHLEVIVGDIGEPNLGLDQATWQRLAQSVDLIVHPAALVNHVLPYDQLFGPNVVGTAELIRLAVTTRIKPVTYLSTVAVAMTVDPGEFAEDGDIRAVSAVRPIDDGYANGYANSKWAGEVLLREAHDLCGLPVAVFRSDMILAHSRYAGQLNVPDAFTRLMFSLLTTGIAPSSFYRTDEHGNRAVAHYDGLPADFVAEAVTTLGEQMAAEESGEYRSYDVMNPHDDGVSLDVFVDWLIAAGHDIRRIEDYDEWLGRFTTALRVLPDKQRQHSVLPLLDAYREPATPLRGAPAPTDVFRHAVRTAKIGEDEDIPHLSAALIDKYVADLRLLGLV

SEQ ID NO: 246 - protein, 1189 aa, Artificial Sequence
  Mycobacterium ahvazicum
MTIDAKRDNGTSASVTTTPRERVAERIRRVVATDEQYQYARPDLALQAAARRPGLRLPQILETFVEGYGDRPALGWRARELSTDPTTGRTTTRLLPRFDTISYRDLWANVRAVATAWRRDEATPVAPGDVVATLGFASPEYLTLDLVTGYLGLVAVPLQHNATASRLQRIVAEIEPQVLAAGAEYLDLAVEAALGSTSLRRLVVFDYQTDIDDQRENLERAQAKLAEAGMAVTVEIFDELVERGRALPPEPFYTGETDERLAMIMYTSGSTGLPKGAMYTERMILRLWTNELYPEFADVPVFNVNFMPLNHVGGRIPLSSSFQAGGTSYFVPESDLSTLFDDWNLVRPTEMGMVPRVVEMLYQRYQSAVERLIGQGAEPEDADAAAKAELREQLLGGRVITAFSTTAPLAAEMKTFIESCLDTHVLDGYGLTEVGMVFKDGVVSRPPILDYKLIDVPELGYFHTDKPYPRGELLVKSQTAFGGYFKRPDVTANAFDPDGYYRTGDVMAEIGPDRLVYVDRRNNVLKLAQGEFVAVARLEAVFSSAALVRQIFVYGNSERPYLVAVVVPTREAEQRFAGDPDGLKAALSESLRRTAKLAELQSYEVPADFLVDSEPFSEDNGLLSGVGKLLRPKLKEHYGARLEDLYAELAATRTAELRALREGAADRPVIDTLTRAAQALLGLPGGSPQPHTQFLELGGDSLSALTFSNLLQDIFDVQVPVGQIISPASDLGQLAEYVESERESGAKRPTFSTVHGRGASEVRASELTLDKFIDAATLNAAPKLPHATGTPHTVLLTGANGYLGRFLTLEWLERLADRGGKLITIIRGTDSEAAAKRLEAVFDGGDPGLLQRYRTLAADHLEVIVGDIAEPNLGLDQATWQRLAEDVEMIVHPAALVNHVLPYDQLFGPNVVGTAELIRLAITIRIKPVTYMSTVAVAMSVDPSVFAEDGDIRAVSPVRPVDDSYANGYANSKWGGEVLLREAHDLCGLPATVFRSDMILAHSQYAGQLNVPDAFTRLIFSLLVTGIAPSSFYQTDPQGNRAVAHYDGLPADFVAESVTTLGEQTAVAGGYRSFDVMNPHDDGISLDVFVDWLIAGGNDIRRIDDHDEWFGRFETALRALPDKQRQHSVLALLDVYRKPEAPLRGAPAPTDVFRGAVRAAKIGADKDIPHLSEGLIEKYVADLRLLGLV

SEQ ID NO: 247 - protein, 1169 aa, Artificial Sequence
  Mycobacterium florentinum
MDEDPDERMSRRVAEYFDNDPQFRAAAPLPGVIEAVGTPGLRLTEVLETIVEGYADRPALGERARGLVTDAAGRTSVRRHPRFDTISYREVWDRVRAIASAWRNDPENPVVPGDVVATIGFSSADYLVVDLVCAYLGLVTVPLQHNAPVARLRPIIEECEPKIVAVSAEYLDLAAESLLTSTSLRQVMVFDYQAGADEQRENFEQTRVRLQGSDAAVVVTTVDDVVERGRELPAVAPFTEDSNERLAMIMYTSGSTGTPKGAMYTERTITTLWASMLFLTPGLPVINVNFMPLNHLGGRLPLASAFLAGGTSYFVPESDLSTLFEDWALVRPTEVGVVPRVVEMLYQHYRGVVDRGIAEGADPATAEQDALTELREHVLGGRVMGGFVGSAPLAAEMKAFLDSMLGVHVTDGYGLTETGMLTRDGIISRQRVIDYKLVDVPELGYFLTDRPYPRGELLVKTDTMTPGYYKRPEITAEVFDEDGFYKTGDVMAEIGPDHLIYVDRRNNVLKLAQGEFVAVANLESIYAGAPLVRQIFVYGNSERPSLLAVIVPTPEALAEYGNSLALKSAIHQSLQQTAAAAQLQSYEMPVDFILETKPFTDENGLLSGLGKQLRPRLKGHYGEALEQLYTEIAAAQVDEVRVLRETATDRPVVETLTAACRALLGISDADPEAHFTDLGGDSLSALSFSRLLAEIFHVEVPVSVITSPANDIATIADYIDAQRGTRVQRPTFGTVHGQGATAVATGELTLDKFIDAQTLSAAPSLPHATGAPHTVLLTGANGWLGRFLTLEWLERLAVRGGQLVTIVRGRDADDARTRLENAFDSGDPELLSRFRELAAMHLEVLPGDIGDQDLGLDPATWQRLADTVDLIVHPAALVNHVLPYDQLFGPNVVGTAELIRLAITTQIKPVTYLSTIAVAMTVAPGQFQEDGDIRRVSPTRPLNDDYANGYANSKWAGEVLLREANELCGLPVAVFRSDMILAHTRYRGQLNVPDMFTRLIFSLLVTGIAPHSFYERDPACSRARAHYDGLPVDFIAEAITTIGSRVTAGYSSFDVMNPYDDGVSLDVFVDWLIRAGNKIQRIVDYDEWLARFQTALTGLPERQRQQSVLPLLHAFRKPEKAIRGAAAPAEAFHAAVRADKIGPAKDIPHISAELIDKYADDLRQLSLLG

SEQ ID NO: 248 - protein, 1172 aa, Artificial Sequence
  Mycobacterium europaeum
MADRIRHLDAVDEQFRTTKPDASVQQTAREPGLRLPEILRTFVEGYADRAALGWRARSLVTDSATGRTTAQLLPRFDTLTYRELWANVGAIASAWRGDATNPVAPGDFVATVGFASAEYLTLDLVCGYLGLVAVPLQHNAAASRLRPIVTEVEPRVLAAGAGYLDLAVEAALGSASLRRLVVFDYSPRIDDQREAVERARATLSAAGMTVTVETFDELIGRGRTLPLEPAYTGGTDERLAMIMYTSGSTGLPKGAMYTERMLCKLWTNELMPEFADTPVLNVNFMPLNHLGGRIPLSTAFQAGGTSYFVPESDLSTLFDDWNLVRPTEMGLVPRVAEMLYQRYQSAVDRRVSRGVDPESAAAEARTELREQVLGGRIVTAFCGTAPLAAEMRSFVETCLGVHVLDGYGLTEVGMVTKDGRIARPPVLDYKLVDVPELGYFLTDKPFPRGELLVKSLTATPGYFKRPDVTANAFDAQGYYRTGDVMAELEPDRLAYVDRRNNVLKLAQGEFVAVARLEAVFSSAALIRQIFVYGNSERPYLLAVIVPTADALERFAGDPGGLRAALGESLRQSGKLAELQSYEVPVDFLVEADPFSEDNGLLSGVGKLLRPKLKEHYGERLERLYADLAANRATELRALRDGAADRPVIDTLVSAAEALLGLAGGPPDPGALFIELGGDSLSALTFSNLLQDIFDVEVPVGMITGPATTLSQLAEYVAAERRSGSRRPTFATVHGRDATEVRAADLTLDKFIDAKTLAAAAGLPCATGTSHTVLLTGANGYLGRFLCLEWLERLAETGGKLVCIVRGADAAAAAERLEGVYRSGDPRLLERFRELAADHLEVIAGDIGEPNLGLDPATWDSLARGVDLIVHPAALVNHVLPYDQLFGPNVVGTAEIIRLAITERVKPVNYLSTVAVAMSVAEFAEDGDIRAISAVRPIDNGYANGYANSKWAGEVLLREAHDLCGLPVAVFRSDMILAHSRYAGQLNVPDAFTRLIFSLLVTGIAPASFYEATDTGGRAVAHYDGLPADFVAEAVTALGEQIATVADDAAATGTFRSYDVMNPHDDGISLDVFVDWLVADGHDIRRIEDYDEWLGRFGTALRALPDRQRQLSALPLLDAYRKPERPLRGAPAPTDAFRGAVRTAKLGADHDIPHLSADLIAKYVLDLRLLGLL

SEQ ID NO: 249 - protein, 1178 aa, Artificial Sequence
  Mycobacterium sp. E1319
MGPHRARVADRIRRLDAGDEQFRRAKPDLDVQRAAREPGQRLPQILQTFVEGYADRPALGWRARELTTDPATGRTGSRLLPRFDTVTYRELWDNVAAIAAAWRNDAANPVAPGDFLATVGFASAEYLTLDLVCAYLGLVAVPLQHNATATRLQPIVAEVEPRVLAASAGYLDLAVDAAVGSASLQRLVVFDYRPEIDDHRDALERARAKLSAAAMAVTIETLDEVLARGRTLPPEPIYTGDSDERLAMIMYTSGSTGLPKGAMYTERTLCKLWTLEMLPDLADVPVLNVNFMPLNHLGGRIPLATSFQSGGTSYFVPESDLSTLFDDWNLVRPTEMGLVPRVAEMLYQRYQSAVDRRLVDGADAADAEEQARAELRDQVLGGRVVTAFCGTAPLTAEMRNFVETSLGVHILDGYGLTELGMVTKDGWIARPPVLDYKLVDVPELGYFRTDRPYPRGELLVKSLTATPGYFKRPDVTAAAFDEDGYYRTGDVMAELEPDRLAYVDRRNNVLKLSQGEFVAVARLEAVFAAAALVRQIFVYGNSERPYLLAVIVPTDDAVRRFAGDPDGLKAVLAESLRHAARLAELQSYEVPIDFLVESEPFTEDNGLLSGVGKLLRPKLKERYADELEQRYAELATNRATELRALRDGAEDRPVIDTVARAAEALLGLPDGPPAPEASFIDLGGDSLSALNFSNLLRDIFDVEVPVGTLIGPTTDLRQIAALIEAGRESGNLRPTLASVHGRDATSARAADLTLDKFIDAQTLAAAPTLPHLTGAPTTVLLTGANGYLGRFLCLEWLERLAVSGGRLICVVRGADAAAATARLEDAYRSGDPQLLRRFRELAAEHLEVLAGDIGEPNLGLGQDHWHRLTETVDLIVHPAALVNHVLPYDQLFGPNVVGTAEVIRLALTARIKAVTYLSTVAVALSIDPAEFAEDGDIRVVSAERPIDTSYANGYANSKWAGEVLLREAHDLCGLPVAVFRSDMILAHSHHAGQLNVPDAFTRLLISLLLTGIAPASFYEVPAGGGRANAHYDGLPADFVAEAVTTLGERLASTPAAYGGYRSFDVMNPHDDGISLDVVVDWLIGAGRDIRRIDDYQEWLGRFSTALRALPDKQRAQSVLPLLDVYRSPQEALRGAPAPTEVFRTAVQSAKIGADQDIPHLSAKLIEKYVSDLALLGLA

SEQ ID NO: 250 - protein, 1165 aa, Artificial Sequence
  Mycobacterium arosiense ATCC BAA-1401 (DSM 45069)
MDARDEQFRTTKPEPALQSAARETGLRLPQILEIFAQGYAERPALGWRARSLTTDPDTGRTATQLLPRFDTMTYRELWADVRAIAAAWRHAPTNPVAPGDFVATVGFASAEYLTIDLACGYLGLVAVPLQHNTTAARLKPIVDEAEPSVLAAGVGYLDLAIDAALNSSSLRRVVVFDYQPEVDDQREAVERAQAKLSGAGIAVTIETLAEVIERGRSLPPEPMFTGDTDERLAMIMYTSGSTGLPKGAMYTERMLCKLWTTELMPDFPDTPVINVNFMPLNHLGGRIPLSTAFQAGGTSYFVPESDLSTLFDDWNLVRPTEMGLVPRVAEMLYQRYQSAVDRLDASGAESPEAQAQAELREQVLGGRVVTAFCGTAPLAAEMRAFIETCLDVHVLDGYGLTEVGMVTKDGWITQPPVLDYKLIDVPELGYFRTDKPYPRGELLVKSLTGTPGYFKRPDVTANAFDADGYYRTGDVMAELAPGRLAYVDRRNNVLKLAQGEFVAVARLEAVFSSAALVRQIFVYGNSERPYLLAVVVPTDDAARRFAGDADGLKAALGESLRQTAKLAELQSYEVPVDFLVETERFSEDNGLLSGVGKLLRPKLKERYGTRLEELYAELAENRVTELRALREGAADRPVIVTLTRAAEALLGLAGGPPSPDALFIDLGGDSLSALTFSNLLRDIFDVEVPVGMITGPAADLGQLAKYVEAERESASRRPTFATVHGRGATQVRAADLTLDKFIDATTLADAWALPRATGTPHTVLLTGANGYLGRFLLLEWLERVAQTGGRIISIIRAADTAAAAKRLESVFDSGDPQLLERFRALAADHLEVIIGDIGEPKLGLSQANWERLAQSVDLIVHPAALVNHVLPYDQLFGPNVVGTAELIRLALTTRIKPVTYMSTVAVALSVDPATFAEDGDIRTVSALRPVDDSYANGYANSKWAGEVLLREAHDLCGLPVAVFRSDMILAHSRYAGQLNVPDAFTRLLFSLLITGIAPASFYQTDPHGNRAVAHYDGLPADFVAEAVATLGEQIATAAGASGIYRSFDVMNPHDDGVSLDVFVDWLIAAGHDIGRIDDYDEWLSRFTTAIRALPERQRAHSVLPLLDAYRKPETPLRGAPAPTDVFRGAVQDAKIGAEQDIPHLSAALIDKYVADLSLLGLYNGA

SEQ ID NO: 251 - protein, 1163 aa, Artificial Sequence
  Mycolicibacterium litorale
MPTDTREARFEQRVADLAANDAQFAAATPDPDITAAADQPGLRLPAIIKTVFDGYADRPAVGQRTVRFTEDPVTGRTTAELLPAFETITYQQLWQRVQAVAGAWADNPVRPGDRVAVLGFTSVDYTTIDLALVLLGAVSVPLQTSSAVDSLSPIIAETEPALIASSIDYVADAVELALRGPEPKRLVVFDYRPEIDDQRDALAAARTRLAGTAVSVTTLADDIAGAPSTPTVLRDTDEDDPLTLLIYTSGSTGAPKGAMYPAHKVADMWRAAAAHWDEKHGAFPAIVLSFMPMSHVMGRGALYGALSTGGTVYFAARPDLSTFLEDLALTRPTQLNLVPRVWDMIHQEVQSELDRRAGTERAQVLAEKRSSLLGGRFVNAMTGSAPIAPELKAWVEDFLDMHLVEGYGSTEAGAVFVDGLVRRPPVTDYKLVDVPELGYFSTDLPHPRGELLVKSTQLFPGYYKRPEVTAEMFDAEGFYRTGDIVAELGPDQLQYVDRRNNVLKLSQGEFVTVSKLEAAFGRSPLVHQIYLYGNSARPYLLAVVVPTAEALADHDTTELKALIGESLQDVARTAGLQSYEIPRDFLIEATPFTLENGLLTGIRKLAWPRLKERYGPALEQLYVDLAEGQADELRALRQSGSDAPALETVTRAAGALLGAAAADLQPDAHFTDLGGDSLSALTFANLLQEIFDVEVPVGVIVSPANDLAGIAAYVETQRTSGSKRPTFATVHGAGATEAHARDLTLDKFIDEATLAAAATLPGPTGEIRTVLLTGATGFLGRYLALEWLERMSMVDGKVICLVRARSNEDARQRLDSTFDSGDPKLLAHYQQLAAAHLEVIAGDKGEENLGLDPATWQRLADTVDLIVDPAALVNHVLPYRELFGPNAVGTAELIRIALTTKLKPFVYVSTIGVGAGIAAGQFVEDADIRTISATRAVDDSYANGYSNSKWAGEVLLREANDLCGLPVSVFRCDMILADTTYGGQLNLPDMFTRMMLSLVATGIAPASFYELAADGSRQRAHYDGLPVEFIAEAISTLGAQVDEGFETYHVMNPYDDGIGLDEFVDWLVEAGYPIQRIDDYAGWLQRFETAMRSLPDRQRQYSLLPLLHNYQRPEHPINGSIAPTDRFRAAVQDAKIGPDKDIPHVSPEVIVKYATDLTLLGLL

SEQ ID NO: 252 - protein, 1178 aa, Artificial Sequence
  Mycobacterium sp. JS623
MFTDSREDRLARRVADLYSTDIQFVDARPIEALSAAIEQPGLRLPRIMSTVMGAYAERPAVGERGVNLTTDPATGRTSLELLPCFQTITYRELWDRVGAVASGLTQGPGPVQPGDRACVLGFASADYATIDMALVLLGAVSVPLQTRAPVSQLRPIVTETEPRVFGSSIGDLANAVELVLTGYTPARLVVFDYHPDVDDQREAFDAAKTRLAEAGSPVLVETLAALLDRGASLPAAPEFVPDDDEDPLTLLIYTSGSTGAPKGAMYPERLVANFWRRSRWNWGSSVEPLITLSFMPMSHVMGRGILYGTLGQGGTAYFTARSDLSTLFEDLALVRPTELNFVPRIWDMLFTEFQSEVDRRSVDGVDRAVLEADVMAEQAQNLLGGRFVSAMTGSAPISAENKEFVEALLDLHLVEGYGSTEAGIIYIDGQVRRPAVIDYKLVDVPDLGYFHTDQPFPRGELLVKTQDLFPGYYKRPEVTADVFDPDGYYRTGDVVAEVDPDQLVYLDRRNNVLKLSQGEFVTVSKLEAVFGDSPLVRQIYVYGNSARSYVLAVVVPTDDTLNRTGGDVESLKSAISESLQNIAKDVGLQSYEIPRDFIIETTPFTLENGLLTGIRKLARPKLKVHYGDRLEQLYTELADSQANELRALRQNGADRPVLETVIRAAGAVLGAAASDLEPDAHFSDLGGDSLSALTFGNLLREIFDIDVPVGVIVSPASDLRSIAGYIEAERRPGAKRPTFASVHDRSNKPITEVLASDLTLDKFIDAKTLAAASTLPSPSAEVRTVLLTGATGFLGRYLALEWLERMNLVGGKLICLVRAKDDVAARDRLDKTFDSGDPELLRHYRELAAGHLEVIAGDKGEENLGLDQQTWQRLADIVDLIVDPAALVNHVLPYSELFGPNALGTAELIRIALTTKQKPYTYVSTIGVGDQIEPSSFTEDADVRVMSPTRAINEGYANGYGNSKWAGEVLLREANDLCGLPVAVFRCDMILADTAYAGQLNVPDMFTRLLLSVVATGIGPGSFYELDADGNRQRAHFDGLPVGFIADAISTLGAQVVDGYETYHVMNPYDDGIGLDEYVDWLTDAGYPIQRISGYDAWLQRFDTALRALPDKQRQASLLPLLHNYQRPEKPIRGSMAPTDRFRAAVQDAKIGPDKDIPHVTAPMIVKYITDLQLLGLL

SEQ ID NO: 253 - protein, 1404 aa, Artificial Sequence
  Candida albicans SC5314
MTDFWLNYLDNPTLSVLPHDFLKPANNKSVEGTYTFNIDNGSTDFKFGLAVFAALVYRLTGDEDIVIATDESANTPEFIVRLNLTPELTFQELVSKITKEYENSISQINYKALSEVSHRIKEAKGLDENPGLFRLSYQHAHSNQQLNTTVEGSIRDLAIYTDGTKFTIYYNALLYSHERIVIFGEQFAQYLTTVSNDTNTVITKVNLITDFQKKNLPDPTIDLDWSGYRGAIQDIFMDNANKHPDRTCVVETESFLDSNSKTRSFTYQQINQASNVVGNYLKETGIKKGDIVMIYAYRGVDLMIAVMGVLKAGATFSVIDPAYPPARQNIYLSVAKPKGLIGLEKAGTLDQLVVDYISNELDVISTIPQLKVQDDGTLVGGKHEGADNDCLNDYQKFKDQPAGVIVGPDSNPTLSFTSGSEGIPKGVLGRHYSLAYYFPWMAKRFGLSEKDKFTMLSGIAHDPIQRDMFTPLFLGAQLLVPTADDIGTPGKLADWMAKYGATVTHLTPAMGQLLSAQATTAIPSLHHAFFVGDILTKRDCLRLQSLAENVFIVNMYGTTETQRSVSYFEIKSRKADPTYLKNLKDVMPAGTGMHNVQLLVVNRNDRSQTCGVGEVGEIYVRAAGLAEGYRGLPDLNAAKFITNWYVNPDKWIEQDEANKKSSETWREHGWLKPRDRMYRSGDLGRYLPDGNVECCGRADDQVKIRGFRIELGEIDTHLSQHPLVRENVTLVRRDKNEEPTLISYIVPKDSPELKTFKADVDDSIEEANDPIVKGLVAYRELIKDIKGYLKKKLASYAIPTIIVPLVKLPLNPNGKVDKPKLPFPDTAQLAAVAKLSVSSHDAQAAEEENLTKLEEQIRDLWLDVLPNRPATISKDDSFFDLGGHSILGTRMIFELRKKLNVEIPLGVIFKNPTVEQFAKEVEKVIKGGQDFQLADEGKTIQEENKDVADSQSENLNYAEDAKELSKSALLESYSSLKQLPSGSINVFVTGATGFLGSFIVRDLLTARNKNLDIKVYAHVRASSKEAGLQRLRQTGITYGIWDENWAEKIEIVLGDLSKEKFGLDNSQWLDLTNNIDVIIHNGAFVHWVYPYSQLRDANVIGTINVLNMAGEGKAKFFSFVSSTSALDTDYFVNLSDELLAQGKNGISEADDLQGSAKGLGNGYGQSKWAAEYIIRRAGERGLKGCITRPGYVTGFSKTGASNTDDFLLRMLKGSAELGLYPDITNNVNMVPVDHVARVVTATALNPPSSEELTVAHVTGHPRIRFNDFLGCLKAYGYEINPADYPVWTSALEKFVIEESKESALFPLLHFVLDNLPQDTKAPELDDSNVAKSLKQDSKYTGEDFSAGKGVDLDQTGVYISYLIKIGFLPKPTGTGEKKLPEVEISDESLKLISGGAGARGSAAK

SEQ ID NO: 254 - protein, 1168 aa, Artificial Sequence; identical to SEQ ID NO: 206
  Mycobacterium sp. JS623

SEQ ID NO: 255 - protein, 1150 aa, Artificial Sequence
  Nocardia brasiliensis ATCC 700358
MFAEDEQVKAAVPDQEVVEAIRAPGLRLAQIMATVMERYADRPAVGQRASEPVTESGRTTFRLLPEFETLTYRELWARVRAVAAAWHGDAERPLRAGDFVALLGFAGIDYGTLDLANIHLGLVTVPLQSGATAPQLAAILAETTPRVLAATPDHLDIAVELLTGGASPERLVVFDYRPADDDHRAALESARRRLSDAGSAVVVETLDAVRARGSELPAAPLFVPAADEDPLALLIYTSGSTGTPKGAMYTERLNRTTWLSGAKGVGLTLGYMPMSHIAGRASFAGVLARGGTVYFTARSDMSTLFEDLALVRPTEMFFVPRVCDMIFQRYQAELSRRAPAAAASPELEQELKTELRLSAVGDRLLGAIAGSAPLSAEMREFMESLLDLELHDGYGSTEAGIGVLQDNIVQRPPVIDYKLVDVPELGYFRTDQPHPRGELLLKTEGMIPGYFRRPEVTAEIFDEDGFYRTGDIVAELEPDRLIYLDRRNNVLKLAQGEFVTVAHLEAVFATSPLIRQIYIYGNSERSFLLAVIVPTADALADGVTDALNTALTESLRQLAKEAGLQSYELPREFLVETEPFTVENGLLSGIAKLLRPKLKEHYGERLEQLYRDIEANRNDELIELRRTAAELPVLETVTRAARSMLGLAASELRPDAHFTDLGGDSLSALSFSTLLQDMLEVEVPVGVIVSPANSLADLAKYIEAERHSGVRRPSLISVHGPGTEIRAADLTLDKFIDERTLAAAKAVPAAPAQAQTVLLTGANGYLGRFLCLEWLQRLDQTGGTLVCIVRGTDAAAARKRLDAVFDSGDPELLDHYRKLAAEHLEVLAGDIGDPNLGLDEATWQRLAATVDLIVHPAALVNHVLPYSQLFGPNVVGTAEIIRLAITERRKPVTYLSTVAVAAQVDPAGFDEERDIREMSAVRSIDAGYANGYGNSKWAGEVLLREAHDLCGLPVAVFRSDMILAHSKYVGQLNVPDVFTRLILSLALTGIAPYSFYGTDSAGQRRRAHYDGLPADFVAEAITTLGARAESGFHTYDVWNPYDDGISLDEFVDWLGDFGVPIQRIDDYDEWFRRFETAIRALPEKQRDASLLPLLDAHRRPLRAVRGSLLPAKNFQAAVQSARIGPDQDIPHLSPQLIDKYVTDLRHLGLL

SEQ ID NO: 256 - protein, 1188 aa, Artificial Sequence
  Segniliparus rugosus ATCC BAA-974
MTESQSYETRQARPAGQSLAERVARLVAIDPQAAAAVPDKAVAERATQQGLRLAQRIEAFLSGYGDRPALAQRAFEITKDPITGRAVATLLPKFETVSYRELLERSHAIASELANHAEAPVKAGEFIATIGFTSTDYTSLDIAGVLLGLTSVPLQTGATTDTLKAIAEETAPAVFGASVEHLDNAVTTALATPSVRRLLVFDYRQGVDEDREAVEAARSRLAEAGSAVLVDTLDEVIARGRALPRVALPPATDAGDDSLSLLIYTSGSTGTPKGAMYPERNVAQFWGGIWHNAFDDGDSAPDVPDIMVNFMPLSHVAGRIGLMGTLSSGGTTYFIAKSDLSTFFEDYSLARPTKLFFVPRICEMIYQHYQSELDRIGAADGSPQAEAIKTELREKLLGGRVLTAGSGSAPMSPELTAFIESVLQVHLVDGYGSTEAGPVWRDRKLVKPPVTEHKLIDVPELGYFSTDSPYPRGELAIKTQTILPGYYKRPETTAEVFDEDGFYLTGDVVAEVAPEEFVYVDRRKNVLKLSQGEFVALSKLEAAYGTSPLVRQISVYGSSQRSYLLAVVVPTPEALAKYGDGEAVKSALGDSLQKIAREEGLQSYEVPRDFIIETDPFTIENGILSDAGKTLRPKVKARYGERLEALYAQLAETQAGELRSIRVGAGERPVIETVQRAAAALLGASAAEVDPEAHFSDLGGDSLSALTYSNFLHEIFQVEVPVSVIVSAANNLRSVAAHIEKERSSGSDRPTFASVHGAGATTIRASDLKLEKFLDAQTLAAAPSLPRPASEVRTVLLTGSNGWLGRFLALAWLERLVPQGGKVVVIVRGKDDKAAKARLDSVFESGDPALLAHYEDLADKGLEVLAGDFSDADLGLRKADWDRLADEVDLIVHSGALVNHVLPYSQLFGPNVVGTAEVAKLALTKRLKPVTYLSTVAVAVGVEPSAFEEDGDIRDVSAVRSIDEGYANGYGNSKWAGEVLLREAYEHAGLPVRVFRSDMILAHRKYTGQLNVPDQFTRLILSLLATGIAPKSFYQLDATGGRQRAHYDGIPVDFTAEAITTLGLAGSDGYHSFDVFNPHHDGVGLDEFVDWLVEAGHPISRVDDYAEWLSRFETSLRGLPEAQRQHSVLPLLHAFAQPAPAIDGSPFQTKNFQSSVQEAKVGAEHDIPHLDKALIVKYAEDIKQLGLL

SEQ ID NO: 257 - protein, 1185 aa, Artificial Sequence
  Nocardia sp. Y48
MTTGSWSETSEVHGVSGPREERRAAQLRAQDEQVRAAAPLDAVNEATSSPGQRLTQVVAAIMAGYADRPALGERARELVTDPGTGRTSIRLLPWFDTISYRELWTRVGAIASDWHHHPDHPLAAGEFVGILGFTSCDYTTLDLVCLHLGAVCVPLQSSSPASQLRPIIAETGPSILATSAERLDTAVELALGSPTVRRLVVFDSHPEVDEQREALESARQRLTEAGHPAVVDSLAAVLERGRALPPAPLFTPGPDEDPLTMLIYTSGSTGTPKGAMYPERLVHSLWDGLWRDKNALPVIGINYMPMSHLAGRISLLRALSSGGTSYFAAKSDLSTLFEDIALIRPTELNLVPRVCDMLFQRYQSELDRRAPGTSDLDAVDAQVKQELREGFLGGRVVRAMCSTAPLSAEMAAFVESCLDLELHDGYGSTEAGGVVIDKHVLRPPVLDYKLVDVPELGYFRTDTPHPRGELLIKTRTIIPGYFKRPDATAEIFDADGYYQTGDIMAEIGPDQLVYVDRRKNVLKLSQGEFVAVSRLEAVFATSPLVRQVFVYGSSARAYLLAVVVPTEEALRRTVTDNAALKSSISESLQRIAREAELNSYEIPRDLLIETDPFSTENGLLSDARKLLRPRLKEHYGERLEQLYAELAKGQVDELHALRVTGRDRPVLETVTRAAQALLGCASTDLSPDAHFTELGGDSLSALSLSNLLQEIFTVEVPVGVVISPANDLRQLANYVETELSSGAKRPTFATVHGQGSLEVRAADLTLDKFIDSATLAGAKDLPGPSGTARTVLLTGANGYLGRFLCLEWLRRLSQDGGKLVCIVRGSSAEAARRRLEQAFDSGDAELLRLFRELAAEHLEVLAGDIGEPDLGLDEQTWHRLADSVDLIVHPAALVNHVLPYQQLFGPNVVGTAGLIRMAITKRLKPFVYLSTVGVLSAQIAPSALREDLDIRDTSPVRRLDQSYASGYGTSKWAGEVLLREAHEAFGLPAVVFRSDMILAHSRYTGQLNVPDMFTRLLLSLVLTGIAPKSFYRTGSDGGRQRAHYDGLPAEFTAEAITELGARAAAGYRTFNVLNPHDDGISLDVLVDWLAETGHPIQRIEDYQEWFARFDTALRALPEKQRQHCLLPLMHAFEQPGVPVAGSVIPADEFRAAVRTAKIGPDKDIPHLSASLITKYVRDLEQLGLV

SEQ ID NO: 258 - protein, 1164 aa, Artificial Sequence; identical to SEQ ID NO: 170
  Mycolicibacterium vanbaalenii PYR-1

SEQ ID NO: 259 - protein, 1166 aa, Artificial Sequence; identical to SEQ ID NO: 185
  Mycolicibacterium fallax

SEQ ID NO: 260 - protein, 1159 aa, Artificial Sequence; identical to SEQ ID NO: 198
  Brevibacterium casei

SEQ ID NO: 261 - protein, 1126 aa, Artificial Sequence; identical to SEQ ID NO: 215
  Myceligenerans xiligouense

SEQ ID NO: 262 - protein, 1173 aa, Artificial Sequence; identical to SEQ ID NO: 219
  Mycolicibacterium llatzerense

SEQ ID NO: 263 - protein, 1181 aa, Artificial Sequence; identical to SEQ ID NO: 241
  Rhodococcus fascians D188

SEQ ID NO: 264 - protein, 1178 aa, Artificial Sequence
  Mycobacteroides abscessus subsp. abscessus
MTETISTAAVPTTDLEEQVKRRIEQVVSNDPQLAALLPEDSVTEAVNEPDLPLVEVIRRLLEGYGDRPALGQRAFEFVTGDDGATVIALKPEYTTVSYRELWERAEAIAAAWHEQGIRDGDFVAQLGFTSTDFASLDVAGLRLGTVSVPLQTGASLQQRNAILEETRPAVFAASIEYLDAAVDSVLATPSVRLLSVFDYHAEVDSQREALEAVRARLESAGRTIVVEALAEALARGRDLPAAPLPSADPDALRLLIYTSGSTGTPKGAMYPQWLVANLWQKKWLTDDVIPSIGVNFMPMSHLAGRLTLMGTLSGGGTAYYIASSDLSTFFEDIALIRPSEVLFVPRVVEMVFQRFQAELDRSLAPGESNSEIAERIKVRIREQDFGGRVLSAGSGSAPLSPEMTEFMESLLQVPLRDGYGSTEAGGVWRDGVLQRPPVTDYKLVDVPELGYFTTDSPHPRGELRLKSETMFPGYYKRPETTADVFDDEGYYKTGDVVAELGPDHLKYLDRVKNVLKLAQGEFVAVSKLEAAYTGSPLVRQIFVYGNSERSFLLAVVVPTPEVLERYADSPDALKPLIQDSLQQVAKDAELQSYEIPRDFIVETVPFTVESGLLSDARKLLRPKLKDHYGERLEALYAELAESQNERLRQLAREAATRPVLETVTDAAAALLGASSSDLAPDVRFIDLGGDSLSALSYSELLRDIFEVDVPVGVINSVANDLAAIARHIEAQRTGAATQPTFASVHGKDATVITAGELTLDKFLDESLLKAAKDVQPATADVKTVLVTGGNGWLGRWLVLDWLERLAPNGGKVYALIRGADAEAARARLDAVYESGDPKLSAHYRQLAQQSLEVIAGDFGDQDLGLSQEVWQKLAKDVDLIVHSGALVNHVLPYSQLFGPNVAGTAEIIKLAISERLKPVTYLSTVGIADQIPVTEFEEDSDVRVMSAERQINDGYANGYGNSKWAGEVLLREAHDLAGLPVRVFRSDMILAHSDYHGQLNVTDVFTRSIQSLLLTGVAPASFYELDADGNRQRAHYDGVPGDFTAASITAIGGVNVVDGYRSFDVFNPHHDGVSMDTFVDWLIDAGYKIARIDDYDQWLARFELALKGLPEQQRQQSVLPLLKMYEKPQPAIDGSALPTAEFSRAVHEAKVGDSGEIPHVTKELILKYASDIQLLGLV

SEQ ID NO: 265 - protein, 459 aa, Artificial Sequence
  Escherichia coli
MNRLPSSASALACSAHALNLIEKRTLDHEEMKALNREVIEYFKEHVNPGFLEYRKSVTAGGDYGAVEWQAGSLNTLVDTQGQEFIDCLGGFGIFNVGHRNPVVVSAVQNQLAKQPLHSQELLDPLRAMLAKTLAALTPGKLKYSFFCNSGTESVEAALKLAKAYQSPRGKFTFIATSGAFHGKSLGALSATAKSTFRKPFMPLLPGFRHVPFGNIEAMRTALNECKKTGDDVAAVILEPIQGEGGVILPPPGYLTAVRKLCDEFGALMILDEVQTGMGRTGKMFACEHENVQPDILCLAKALGGGVMPIGATIATEEVFSVLFDNPFLHTTTFGGNPLACAAALATINVLLEQNLPAQAEQKGDMLLDGFRQLAREYPDLVQEARGKGMLMAIEFVDNEIGYNFASEMFRQRVLVAGTLNNAKTIRIEPPLTLTIEQCELVIKAARKALAAMRVSVEEA

SEQ ID NO: 266 - protein, 484 aa, Artificial Sequence
  Candidatus melainabacteria
MGNSINHLNNAYSQKLSGAEGAVEFRDEGVYTYDNQGRRYLDCLGGFGIFNVGHRHPKVINAVKAQLDQVALHSQELINPWAAHLASQLAAVAPGDLQYCFFGNSGSEAVEGAIKLARLYTGKTEIISTKNAYHGVSMGALSATGRDVFRKPFEPLLNGFVHVPFGDIAALEAAINENTAAVILEPIQGEGGINVPPTGYLRKVRQLTRKKGVLLILDEVQTGMGRTGRMFACEHEGVVPDILCLAKALGGGVMPIGCFMASAKVWKVLEPNPTIHNSTFGGNPLACSAASACVEVLLEEHLPARAAVMGNYFMRKLNELKERYPAHVADVRGKGLLIGLEFTSKELREAVQVELFYRGVLVAGTLNANRTFRIEPPLIITESQINFMIEALESILMEIGADELSEMAAQANAEIGAAAKTARRRSRKVEAPRADIAPEPAGRVLAPVKAAATSRGAKAKTAKRKPKKGKKVKAKSVYKAKGRK

SEQ ID NO: 267 - protein, 476 aa, Artificial Sequence
  Enterobacteriaceae
MQYLTQYHVIRDPREHILNRLPSSASALACTAHALNLIEKRTLDHEEMKQLNREVIDYFKEHVNPGFLEYRKSVTAGGDYGAVEWQAGSLNTLVDTQGQEFIDCLGGFGIFNVGHRNPVVVSAVQNQLAKQPLHSQELLDPLRAMLAKTLAALTPGKLKYSFFSNSGTESVEAAIKLAKAYQSPRGKFTFIATSGAFHGKSLGALSATAKSTFRKPFMPLLPGFRHVPFGDINAMRTVLSECRKTGDDVAAVILEPIQGEGGVILPPQGYLPAVRQLCDEFGALLILDEVQTGMGRTGKMFACEHENVQPDILCLAKALGGGVMPIGATVATEEVFSVLFDNPFLHTTTFGGNPLACAAALATINVLLEQNLPAQAEQKGDMLLDGFRQLGREYPDLVQEARGKGMLMAIEFVDNEIGYSFASEMFRQRVLVAGTLNNSKTIRIEPPLTLTIEQCEQVLKAARKALAALRVSVEEA

SEQ ID NO: 268 - protein, 503 aa, Artificial Sequence
  Citrobacter
MRLNVVQARSSLVFIPIFVKRVGMAQSLQYLIQYHVIRELREHILNRLPSSASALACSAHALNLIEKRTLDHEEMKALNREVIDYFKEHVNPGFLEYRKSVTAGGDYGAVEWQAGSLNTLVDTQGQEFVDCLGGFGIFNVGHRNPVVVSAVQNQLAKQPLHSQELLDPLRAMLAKTLAALAPGKLKYSFFSNSGTESVEAALKLAKAYQSPRGKFTFIATSGAFHGKSLGSLSATAKSTFRKPFMPLLPGFRHVPFGDIDAMRTVLSECKKTGDDVAAVILEPIQGEGGVILPPQGYLTAVRKLCDEFGALMILDEVQTGMGRTGKMFACEHENVQPDILCLAKALGGGVMPIGATIATEEVFSVLFDNPFLHTTTFGGNPLSCAAALATINVLLEQNLPAQAEQKGDMLLDGFRHLAREYPDLVHDVRGKGMLMAIEFVDNEIGYSFASEMFRQRVLVAGTLNNAKTIRIEPPLTLTIEQCELVLRSTRKALAALRVSVEQV

SEQ ID NO: 269 - protein, 496 aa, Artificial Sequence
  Enterobacteriaceae
MRCFLVFIPIFAKRAGMAQSLQYLNQYHVIRELREHILNRLPSSASALACSAHALNLIEKRTLDHEEMKSLNKEVIEYFKEHVNPGFLEYRKSVTAGGDYGAVEWQAGSLNTLVDTQGQEFVDCLGGFGIFNVGHRNPVVVSAVQNQLAKQPLHSQELLDPLRAMLAKTLAALAPGKLKYSFFCNSGTESVEAALKLAKAYQSPRGKFTFIATSGAFHGKSLGALSATAKSTFRKPFMPLLPGFRHVPFGDINAMRTMLSECKKTGDDVAAVILEPIQGEGGVILPPQGYLTAVRKLCDEFGALMILDEVQTGMGRTGKMFACEHENVQPDIMCLAKALGGGVMPIGATIATEEVFSVLFDNPFLHTTTFGGNPLACAAALATINVLLEQNLPAQAEQKGDMLLDGFRQLAREYPDLVHDVRGKGMLMAIEFVDNEIGYNFASEMFRQRVLVAGTLNNAKTIRIEPPLTLTIEQCDLVLRATRKALAALRVSVEQV

SEQ ID NO: 270 - protein, 458 aa, Artificial Sequence
  Chloroflexi bacterium
MEKMVMAKDFGGALDYSSRWLDMIRRNEFPSVEEAHQIIEESKHNFAEYYNRNWLEYRKSVTEAGDWAAVEWTGSGAVFQDVLGREYLDFLGGYGMMDLGWSHPEVVAAVRAQLERTPMPSQELIDPLRGVLARLMAEITPGDLKYSWFAASGTEAIEAAIKIAKLYSKKSAFIVAVKAFHGKTMGSLSMMGKSDYRTPLGQLYGGHVYHVPFGDADAVEKQLEVCEKVGIGVAAVLFEPIQGEAGGIAPPDDFWPRVREATRKHDVLLIADEVQTGLGRTGKLWGVDHWGVVPDILAVAKSLGGGVMPVSAVCTTEEIFQPMMYPNPFMHTTTTGGNALACSAAIAAIHITLRDRLWEQAAEKGEYLIPKLQKLADQYPQIYEKITGKGLLIGMHFKTPEIGYKVASGLFKRNILVAGTLTSAQTVRIEPSLLVTYGQLDTLLDRLEDTLKSIGRSE

SEQ ID NO: 271 - protein, 487 aa, Artificial Sequence
  Anaerolineae bacterium
MVIGNWRLEIGDWLLCRIFTIRNLEQQIHPDIQYLSPMPIYPDAVSYAHRWLDIIAKPSLTQAEGEAIVEETLYNFANHFNRGFLEYRKSVTEAGMFAATEWTGRGAVMQDAFGREWIDCLGGYGLLSLGWSHPRVVEAVRAQLSRTPMPSQELLDPLRGVLARLLAMITPGDIGYFFFAAGGTEAVEGAMKLAKMYTRKAGFITSLRGFHGKTMGSLSLLGKSDFRAPALPLYPYVQWVPFGDADAVERQLQIADAVGQDIAAVVMEPIQGEAGAIVPPDDFWPRLRQLCDRYGVLLIADEVQTGLGRTGKLWGVDHWEVVPDIITMGKALGGGVMPVSCFGAREEIWGVMMEPNPFVHTTTTGGNPLACAAAIAAITVTLEEDLPRQAAEKGAYFKAGLEKLAANYPMIYDRISGRGLLLGQHFRDAEVGYSVAAGLFKRGVVVAGTLTNARTVRIEPPLVIEYEQIDAVLERLDDTLREVRAGL

SEQ ID NO: 272 - protein, 503 aa, Artificial Sequence
  Citrobacter freundii
MALNVAQIRCFLVFIPIFAKRAGMAQSLQYLNQYHVIRELREHILNRLPSSASALACSAHALNLIEKRTLDHEEMKSLNREVIEYFKEHVNPGFLEYRKSVTAGGDYGAVEWQAGSLNTLVDTQGQEFVDCLGGFGIFNVGHRNPVVVSAVQNQLAKQPLHSQELLDPLRAMLAKTLAALAPGKLKYSFFCNSGTESVEAALKLAKAYQSPRGKFTFIATSGAFHGKSLGALSATAKSTFRKPFMPLLPGFHHVPFGDVNAMRTMLSECKKTGDDVAAVILEPIQGEGGVILPPQGYLTAVRKLCDEFGALMILDEVQTGMGRTGKMFACEHENVQPDIMCLAKALGGGVMPIGATIATEEVFSVLFDNPFLHTTTFGGNPLACAAALATINVLLEQNLPAQAEQKGDMLLDGFRQLAREYPDLVHDVRGKGMLMAIEFVDNEIGYNFASEMFRQRVLVAGTLNNAKTIRIEPPLTLTIEQCDLVLRSTRKALAALRVSVEQM

SEQ ID NO: 273 - protein, 453 aa, Artificial Sequence
  Anaerovorax odorimutans
MTAFNREAALEQVRRIVGYIEKPELTNEEKDTIVKESISNFNENVNPGWLEYRKSVSTDATFVEWTDSVDHFEDLYGHEFIDCLGGFGIYTCGHRNPEILKTVKAQLDRYALHSQELVDPLRGYLANTLAMITPGDLQYCFFTNGGAEAVEMALKLARLATGGRYYISTVGAFHGKSYGAISMGGKGAYREDYLPMIQQVQHVEYGNAEAMEAAIKNLHTVGEKVAGVIIEPIQGEAGVIIPPDGYLTKVREICDKYGVAMILDEIQTGMGRCGTMWRCEHEGVTPDIMTYGKAFGGGIMPITGIIARPNMWGQKLIDNPWILGSPTFGGNPLACSAALATIKFMLENDVPKMAKEKGDYFMVKLNALKEKYPTVLKQVRGAGLLICMEFPEAEVGYEITKGLFSRKVMTAGTLVNAKTVRIEPPAVLSYEKIDHVMAMLEESIIDAKKEFNL

SEQ ID NO: 274 - protein, 479 aa, Artificial Sequence
  Citrobacter braakii
MQSLQYLNQYHVIRELREHILNRLPSSASALACSAHALNLIEKRTLDHEEMKSLNREVIEYFKEHVNPGFLEYRKSVTAGGDYGAVEWQAGSLNTLVDTQGQEFVDCLGGFGIFNVGHRNPVVVSAVQNQLAKQPLHSQELLDPLRAMLAKTLAALAPGKLKYSFFCNSGTESVEAALKLAKAYQSPRGKFTFIATSGAFHGKSLGALSATAKSTFRKPFMPLLPGFRHVPFGDINAMRTMLSECKKTGDDVAAVILEPIQGEGGVILPPQGYLPAVRKLCDEFGALMILDEVQTGMGRTGKMFACEHENVQPDIMCLAKALGGGVMPIGATIATEEVFSVLFDNPFLHTTTFGGNPLACAAALATINVLLEQNLPAQAEQKGDMLLDGFRQLAREYPDLVHDVRGKGMLMAIEFVDNEIGYNFASEMFRQRVLVAGTLNNAKTIRIEPPLTLTIEQCDLVLRSTRKALAALRVSVEQV

SEQ ID NO: 275 - protein, 453 aa, Artificial Sequence
  Anaerolineaceae bacterium
MAYDYEDALDYSSRWIDLIHKNEFPTVDEAHTIISESTHNFAEYYNRNWLEYRKSVTESGDWAAVEWGGSGAVFKDVLGREYLDFLGGYGMMDLGWSHPEVVKTVRAQLERSPMPSQELLDPLRGVLAKLLASITPGDLKYSWFGASGTEANEAAMKIAKLYTGKTAFIVGVRAFHGKTMGSLSLIGKSDFRASMGAMYGGQVYHVPFGDADAVEKQLEICEKVGIGVAAVMFEPIQGESGAIVPPDDFWPRIRAATKKHGVLLIADEVQTGLGRTGRLWGVEHWNVVPDILTVAKSLGGGVMPISAVITTEEVFHPMMYPNPFMHTTTTGGGALACSAAIAAINVTLREKMWEQAADKGAYLIPQLEKFASQYPQIYEKITGKGLLIGMHFKTPGIGYKVASGLFKRGVLVAGTLTSAQTVRIEPPLVVTREQMDMLLDRLGDTLKEINTAM

SEQ ID NO: 276 - protein, 482 aa, Artificial Sequence
  Citrobacter koseri
MDMAQSLQYLTQYHVIREFREHILNRLPSSASALACSAHALNLIEKRTLDHEEMKALNREVIDYFKEHVNPGFLEYRKSVTAGGDYGAVEWQAGSLNTLVDTQGQEFIDCLGGFGIFNVGHRNPVVVSAVQNQLAKQPLHSQELLDPLRAMLAKTLAALTPGKLKYSFFSNSGTESVEAALKLAKAYQSPRGKFTFIATSGAFHGKSLGSLSATAKSTFRKPFMPLLPGFRHVPFGNIEAMRTALSECKKTGDDVAAVILEPIQGEGGVILPPQGYLTAVRKLCDEFGALMILDEVQTGMGRTGKMFACEHENVQPDILCLAKALGGGVMPVGATIATEEVFSVLFDNPFLHTTTFGGNPLACAAALATINVLLEQNLPAQAEQKGDMLLDGFLQLAREYPDLVQDARGKGMLMAIEFVDNEIGYNFASEMFRQRVLVAGTLNNSKTIRIEPPLTLTIEQCEQVLKATRKALAALRVSVEET

SEQ ID NO: 277 - protein, 443 aa, Artificial Sequence
  Enterobacteriaceae bacterium ATCC 29904
MLNLIEKQTLDHEEMKQLNREVIDYFKEHVNPGFLEYRKSVTAGGDYGAVEWQAGSLNTLVDTQGQEFIDCLGGFGIFNVGHRNPVVVSAVQNQLAKQPLHSQELLDPLRAMLAKTLAALTPGKLKYSFFSNSGTESVEAALKLAKAYQSPRGKFTFIATSGAFHGKSLGALSATAKSTFRKPFMPLLPGFRHVPFGDIAALRLQLSECRNTGDDVAAVILEPIQGEGGVILPPQGYLPAVRQLCDEFGALLIFDEVQTGMGRTGKMFACEHENVQPDILCLAKALGGGVMPIGATVATEEVFSVLFDNPFLHTTTFGGNPLACAAALATINVLLEENLPAQAEQKGDMLLDGFRQLGREYPDLVQDARGKGMLMAIEFVDNAIGYNFASEMFRQRVLVAGTLNNAKTIRIEPPLTLTIEQCEQVLKAARKALAALRVSVEEA

SEQ ID NO: 278 - protein, 443 aa, Artificial Sequence
  Lelliottia amnigena
MLNLIEKRTLDHEEMKQLNREVIDYFKEHVNPGFLEYRKSVTAGGDYGAVEWQAGSLNTLVDTQGQEFIDCLGGFGIFNVGHRNPTVVSAVQNQLEKQPLHSQELLDPLRAMLAKTLAALTPGKLKYSFFCNSGTESVEAALKLAKAYQSPRGKFTFIATTGAFHGKSLGALSATAKSTFRKPFMPLLPGFRHVPFGDINAMRTVLSECRKTGDDVAAVILEPIQGEGGVILPPQGYLPAVRKLCDEFGALLILDEVQTGMGRTGKMFACEHENVQPDILCLAKALGGGVMPIGATVATEEVFSVLFDNPFLHTTTFGGNPLACAAALATINVLLEQNLPAQAEQKGDMLLDGFLQLGREYPDLVQDARGKGMLMAIEFVDNEIGYNFASEMFRQRVLVAGTLNNSKTIRIEPPLTLTIEQCEAVLKAARKALAAMRVSVEEA

SEQ ID NO: 279 - protein, 476 aa, Artificial Sequence
  Enterobacter
MQYLIQYHVIRDPREHILNRLPSSASALACTAHALNLIEKRTLDHEEMKQLNREVIDYFKEHVNPGFLEYRKSVTAGGDYGAVEWQAGSLNTLVDTQGQEFIDCLGGFGIFNVGHRNPVVVSAVQNQLAKQPLHSQELLDPLRAMLAKTLAALTPGKLKYSFFSNSGTESVEAAIKLAKAYQSPRGKFTFIATSGAFHGKSLGALSATAKSTFRKPFMPLLPGFRHVPFGDISAMRTMLSECRKTGDDVAAVILEPIQGEGGVILPPQGYLPAVRQLCDEFGALLILDEVQTGMGRTGKMFACEHENVQPDILCLAKALGGGVMPIGATVATEEVFSVLFDNPFLHTTTFGGNPLACAAALATINVLLDQNLPAQAEQKGDMLLDGFRQLGREYPDLVQDARGKGLLMAIEFVDNEIGYSFASEMFRQRVLVAGTLNNSKTIRIEPPLTLTVEQCEQVLKAARKALAALRVSVEEA

SEQ ID NO: 280 - protein, 478 aa, Artificial Sequence
  Yokenella regensburgei
MQYLNRYHVIRELPEHILNRLPSSASALACTAHALNLIEKRTLDHEEMKALNVEVKEYFKEHVNPGFLEYRKSVTAGGDYGAVEWQAGSLNTLVDTQGQEFIDCLGGFGIFNVGHRNPVVVSAVQNQLAKQPLHSQELLDPLRAMLAKTLAALTPGKLKYSFFCNSGTESVEAAIKLAKAYQSPRSKFTFIATSGAFHGKSLGALSATAKSTFRKPFMPLLPGFRHIPFGDISAMRSVLTECKKTGDDVAAVILEPIQGEGGVILPPPGYLPAVRKLCDEFGALMILDEVQTGMGRTGKMFACEHENVQPDIMCLAKALGGGVMPIGATIATEEVFSVLFDNPFLHTTTFGGNPLACAAALATINVLLEQNLPAQAEQKGDMLLDGFRNLMREYPDLIQDVRGKGMLMAIEFVDNETGYTFASEMFRQRVLVAGTLNNSKTIRVEPPLTLTPEQCQLVLKATRKALAALRVAVEQEES

SEQ ID NO: 281 - protein, 469 aa, Artificial Sequence
  Enterobacter huaxiensis
MVIRDPREHILNRLPSSASALACTAHALNLIEKRTLDHEEMKQLNREVIDYFKEHVNPGFLEYRKSVTAGGDYGAVEWQAGSLNTLVDTQGQEFIDCLGGFGIFNVGHRNPVVVSAVQNQLAKQPLHSQELLDPLRAMLAKTLAALTPGKLKYSFFSNSGTESVEAALKLAKAYQSPRGKFTFVATSGAFHGKSLGALSATAKSTFRKPFMPLLPGFRHVPFGDINAMRALLSECRKTGDDVAAVILEPIQGEGGVILPPQGYLPAVRQLCDEFGALLIFDEVQTGMGRTGKMFACEHENVQPDILCLAKALGGGVMPIGATVATEEVFSVLFDNPFLHTTTFGGNPLACAAALATINVLLEQNLPAQAEQKGDMLLDGFRQLGREYPDLVQDARGKGMLMAIEFVDNETGYSFASEMFRQRVLVAGTLNNSKTIRIEPPLTLTIEQCEQVLKAARKALAALRVSVEEA

SEQ ID NO: 282 - protein, 477 aa, Artificial Sequence
  Shigella dysenteriae
MLQYLNRYHVIREPPEHILNRLPSSASALACSAHALNLIEKRTLDHEEMKALNREVIEYFKEHVNPGFLEYRKSVTAGGDYGAVEWQAGGLNTLVDTQGQEFIDCLGGFGIFNVGHRNPVVVSAVQNQLAKQPLHSQELLDPLRAMLAKTLAALTPGKLKYSFFCNSGTESVEAALKLAKAYQSPRGKFTFIATSGAFHGKSLGALSATAKSTFRKPFMPLLPGFRHVPFGNIEAMRTALNECKKTGDDVAAVLLEPIQGEGGVILPPPGYLTAVRKLCDEFGALMILDEVQTGMGRTGKMFACEHENVQPDILCLAKALGGGVMPIGATIATEEVFSVLFDNPFLHTTTFGGNPLACAAALATINVLLEQNLPAQAEQKGDMLLDGFRQLAREYPDLVQEARGKGMLMAIEFVDNEIGYNFASEMFRQRVLVAGTLNNAKTIRIEPPLTLTIEQCELVIKAARKALAAMRVSVEEA

SEQ ID NO: 283 - protein, 451 aa, Artificial Sequence
  Vibrio sp. LJC006
MDFSKRNVDDAFMEATKMVSLLTKEEKEINEEERTWIAQSTYENFENHINKGFLEYRKSVTETEGIALTDWSGQGSILKDVLGREFIDMLGGFGLYSPGIRHPKIVAAAKAQIDRSPQYSQEMLDPLRAHLAKVIAKLTPGDIQYGFFANSGTEAVDGAMKLAKMYTGKKGFISTLKAFHGKSLGALSLLGKAVYREPVGPLLDGVRHVPYGDADAVEAQLQAAQEVGEGIAAVIAEPIQGEAGAIVPPDDYWPRLREICDKYGVLLIADEVQTGFGRTGKLFGVDHWNVTPDIMCFGKALGGGVIAMSGFFASAKIWKVLEPNPFMHTTTTGGNPVACAAALAQISVLLEEDLAGQAAEKGDYIKRKLGELQRRYPDVLKDVTGRGLLLGMVFKNDEVGFEVVSGLFKRGILIAGTLNNSEVVRVEPALNISYDLIDTFLVELEEVMKTL

SEQ ID NO: 284 - protein, 464 aa, Artificial Sequence
  Desulfobulbaceae bacterium
MTEVARTTTQHPAAAERNVNLALEEAKRMVDLIGTAEKDVTMEDRQWVAETTYQNFANHINKGFLEYRKSVTETEDFALTDWYGEGSILRDVMGREYIDMLGGFGLYSPGIRHPKIVAAAKAQLDRSPQYSQEMLDPLRAHLAKVIAQLTPGDIQYGFFANSGTEAVEGAMKLAKLYTGKKGFISTLNGFHGKTLGSLSLIGKSVYRKPLLPLLEGIHQVPFGDAGAVEQVLASAKMVGDGIAGVVVEPIQGEAGAVVPPDDYWPKLREICDKYEVLLIADEVQTGFGRTGKLFGVDHWNVTPDIMCFGKALGGGVVAMSGFFSTAKIWKCMEPNPFMHTTTTGGNPLACAAALAQITVLLEEDLAGQAAAKGEYITSRMLTLKEKYPHILQGFRGRGLLLAMVFPTDEIGYKVATGLFSRNVLTAGTLNNARAIRIEPALTVSYDILDEMLRRMEATFASITI

SEQ ID NO: 285 - protein, 453 aa, Artificial Sequence
  Chloroflexi bacterium
MTNTYDDVLAYSNQWLDIIKQESFPEEQQAKWIIAESKHNFAEHFNRNWLEYRKSVTEAGDWAAVEWSGKGSTFTDVLGRRYIDWLGGFGMLDLGWCHPEVVAAVTAQVKRSPMPSQELIDPLRGVLARILAEITPGDLKYSWFAASGTEAIEAAIKIAKLYTGNSAFIVAVKGFHGKTLGSLSMIGKSDFRQSMGVMYGGKDYHVPYGDAGAVEQQLEICEKVGVGVAAVIFEPIQGEAGGIVPPDDFWPRIRQATRNHGVLLIADEVQTGLARTGKLWGVDHWDVAPDIIATAKSLGGGVMPVSAVTTTEEIFHPMMYPNPFMHTTTTGGGALACSAAIASINVILRDRLWEGAASMGAYLKEKVQDLADEFPQIYQKVTGKGLLIGQHFHTPELGYKVAAELFKRGVLVAGTLTSAQTVRIEPPLIISQEEIDEGLNRLSDAVGAVAAAI

SEQ ID NO: 286 - protein, 453 aa, Artificial Sequence
  Bacillus sp. PK3_68
MRKSNEEALQIATEILELIESDSLSEKQKDQIIEDSIYNFTNFVNKAILDHRKSASTDFSFVEWEDEKAIFRDTKNREFIDCLGGYGVYLLGHRHPKVVKAVEAQLKRYALHSQELVDPLRGYLSKLVAAITPGDMQYTYFTNSGAEANEMALKLARLATGKTHFISTVNGFHGKTFGALSSSGKAVFREPYLPLVPGFHHVPFGDVDAMENMINQLEATGEKVAGIIVEPIQGEGGINIPSADYFPRLREICDEHNCVLIVDEIQTGMGRTGTLFGIDHWNVVPDIMTLGKAFGGGVMPITAMVARPHLWKKMEENPFLLGSSTFGGNPLCCAGAIAGIKTILEENIVEQAKEKGDYIVEKLAEIQKSYPEVMVAVRGKGLLIGMEFATNEIGFELAKRLFNDQILVGGTLNNATVIRIEPPAVITYEQIDTVIGAIDKHVANLAKKTAVTS

SEQ ID NO: 287 - protein, 470 aa, Artificial Sequence
  Thermosporothrix hazakensis
MRGDGLPQALHDSQRYLDVVLKPQLSPTEAQWLIEKTVDNFTNYFNSGFIDYRKSVTEAGDYAAVEWTGRGATFKDALGRTFIDCLGGYGLFNLGWAHPEVVRAVQTQAAKSPLPSQELLDPLRGMLAHLLAEITPGDIQYSFFVSSGTEAVEGAMKLAKLYTGKSGFIAAVRGFHGKTTGSLALTGKALYRRPPLPLHPDIYHVPYGDAEAVEMQLRIAREVGNDIAAVVMEPIQGEAGAIVPPDDFWPRLRQICDAYQVLLIADEVQTGMGRTGKMWGVEHWNVVPDIMTSAKALGGGVMPVGAFMAKPEIWQVLNENPFIHTTTTGGNPLACAAAIAAIHVSLRERVAEQAATKGEYLLAQLRKLATQYSDFFEDITGKGLLLGMHFKDDEIGYAISAGLFKRGVLISGTMNNARVIRVEPPLVITRDEIDTVLDRLDDTLRSLRVARAGERNTDALVAVKDVAVAG

SEQ ID NO: 288 - protein, 466 aa, Artificial Sequence
  Hafnia alvei
MSRTNVVLNPLECTQQALNWIEKKSLTHDEMVALNKEVLSNFREYVNPGFLEYRKSVTVGGDYGAVEWQASGLNTLVDTQGNEYIDCLGGFGIFNVGHRNPKVISAVESQLAKQPLHSQELLDPLRSMLAKTLAAITPGDLKYTFFCNSGTESVEAALKLAKAYQSPHGKYTFVAATGAFHGKSLGALSATAKSIFRRPFMPLLPGFHHVPFGDIEALRTQLHECKKTGDDVAAVLLEPIQGEGGVILPPKGYLPAVRALCDEYGALLIFDEVQTGMGRTGKMFACEHENVTPDILCLAKALGGGVMPIGATVANEKVFSVLFDNPFLHTTTFGGNPLSCAAALATFNVLLTEDLPAKATERGQQLMDGFRRLATQYPEFMMEVRGQGLMQAIEFIKSEVGYAFSREMFQRNVLVAGTLNNSKSIRIEPPLTITAEQCKQVLTRAEEALKAMRALSPTQQPTMSVA

SEQ ID NO: 289 - protein, 454 aa, Artificial Sequence
  Quasibacillus thermotolerans
MSTELKNKEQLSNVSEYIKQVLALIEKEEVTEQEAEWVTKETVDNFREHVNPGFLSYRKTVTEGGQFAAVEWSDGGSCFTDISGKKYIDCLGGFGIYNVGHRHPKVVKAVTDQLNRQALHSQDLLDPLRAMLAKILADITPGDLKYSFFTNSGTESVEAALKLAKMYSNRSTIISTTRSFHGKSLGSLSGTAKGVFRKPFLPLIPGFRHIPYGDIDMMRKTFESCALVGEDVGAVILEPIQGEGGIIIPPADYLKEVRELCDEYDVVLIFDEVQTGMGRTGKMFAAELCGVTPDIICLAKAFGGGVMPAGAVVANEKVFKNLFDNPFMHTTTFGGNPLACAAAIATIDVLLEENLPERAAEVGDYFLKGLKEAASGHEDKVLEVRGQGLMIGIEFHKDEIGYEVSKGMFDKGVLVAGTLVNSKTIRIEPPLTISYEEVDTVIRTFKEVLSKVEK

SEQ ID NO: 290 - protein, 469 aa, Artificial Sequence
  Lelliottia
MVIRDPPELILNRLPSSASALACTAHALNLIEKRTLDHEEMKQLNREVIDYFKEHVNPGFLEYRKSVTAGGDYGAVEWQAGSLNTLVDTQGQEFIDCLGGFGIFNVGHRNPVVVSAVQNQLAKQPLHSQELLDPLRAMLAKTLAALTPGKLKYSFFCNSGTESVEAALKLAKAYQSPRGKFTFIATTGAFHGKSLGALSATAKSTFRKPFMPLLPGFRHVPFGDINAMRTVLTECRKTGDDVAAIILEPIQGEGGVILPPQGYLPAVRKLCDEFGALLILDEVQTGMGRTGKMFACEHENVQPDILCLAKALGGGVMPIGATIATEEVFSVLFDNPFLHTTTFGGNPLACAAALATINVLLEQNLPAQAEQKGDMLLDGFLQLGREYPDLVQDARGKGMLMAIEFVDNEIGYNFASEMFRQRVLVAGTLNNSKTIRIEPPLTLTIEQCEQVLKAARKALAAIRVSVEEA

SEQ ID NO: 291 - protein, 459 aa, Artificial Sequence
  Aneurinibacillus thermoaerophilus
METTMNKYKEVYEYTAKVLDIIEKTDVTKEEAQWITSETVNGFRENVNSGFLEYRKSVTKGGQYASVEWKDSGLNCFIDVNGKEYIDCLGGFGIYNVGHRHPKVVKAVKDQLDKQALHSQDLLDPLRAMLAKALAMLTPGDLKYSFFGNSGTEAVEAALKLAKIYHHKEGRSTFIATTRAFHGKSLGSLSGTAKGVFRKPFIPLVSGFRHVAFGDIDMMKKTMHACHMVGEDVAAVIVEPIQGEGGVIIPPDDYLPKLRELCDEYGALLIFDEVQTGMGRTGKMFCAEHYGVTPDIMTLAKAFGGGVMPASATIATEEVFSHLFDNPFLHTTTFGGNPLACAAALATINVLIEEKLPERAAEMGEYMLNGLREAAKGHENKVLEVRGKGLLIGIEFVSDEIGYEVAKGFFDNGVLTAGTLINAKTIRIEPPLTIEKEQCDKVCETFAKVLKEVDKAVLV

SEQ ID NO: 292 - protein, 447 aa, Artificial Sequence
  Buttiauxella noackiae
MLNIIEKKSLSHEEMKALNREVIENFQQHVNPGFLEYRKSVTAGGDYGAVEWQANSLNTLVDTQGKEYLDCLGGFGIFNVGHRNPTVVSAVQHQLEKQPLHSQELLDPLRAMLAKTLATLTPGKLKYSFFSNSGTESVEAAIKLAKAYQSPRGKFTFIAASGAFHGKSLGALSATAKSAFRKPFMPLLPGFRHVPFGNIDALRTMLSECRKTGDDVAAVILEPIQGEGGVIIPPAGYLPAVRKLCDEFGALLIFDEVQTGMGRTGKMFACEHENVQPDILCLAKALGGGVMPIGATVATEEVFSVLFDNPFLHTTTFGGNPLACAAALATIHVLLEQNLPAQAAQKGQLLVDGFQALKREFPELVVDARGQGLLIAIEFSDNEIGYNFASEMFRQQVLVAGTLNNSKTIRVEPPLTITIEQCEHVLGCAKKALTSLQVSTLKTELVL

SEQ ID NO: 293 - protein, 452 aa, Artificial Sequence
  Desulfosarcina cetonica
MRSYKDALAYSAKWLDIIKQDSASIDEATAKWISKETKENFVNHFNAGWVNYRKSMTEAGDYGAVEWRGKGARFYDHFGNEYLDFLGGYGALDLGWSHPEVVEAVRAQVLKSGIPSQELMDPLRGVLAKLLTEITPGDIDHAFFVASGTEAVEGALKIARLHTRKHSFISTVKAFHGKTSGSLSVMGKKAFRAPLQPYGAQIFFVPFGDADALERQLEICDAVGIEIAGFVAEPIQGEAGAIVPPDAYWPRVREICDRFGILMICDEVQTGLGRTGALWGVDHWNVKPDIMMAAKSLGGGVMPVGCFMGNGRIWKSLEEPNPFMHTTTTGGNPLACAAAIATIQVTLRDNLPRRAAELGDYFLCKLSVLAEGFPGIYEKITGKGLLIGQHFKDDAVGYRVAAGLFRRKVLVAGTLVNAKAIRFEPPLVVTREEIDEVLNRLEDTLKSVSKMA

SEQ ID NO: 294 - protein, 492 aa, Artificial Sequence
  Leclercia adecarboxylata
MAFIPIFAPSPDVAQSLQYLIQYHVIRHSREHILNRLPSSASALACTAHALNLIEKRTLDHEEMKQLNREVIDYFKEHVNPGFLEYRKSVTAGGDYGAVEWQAGSLNTLVDTQGQEFVDCLGGFGIFNVGHRNPVVVSAVQNQLAKQPLHSQELLDPLRAMLAKTLAALTPGKLKYSFFCNSGTESVEAAIKLAKAYQSPRGKFTFIATSGAFHGKSLGALSATAKSAFRKPFMPLLPGFRHVPFGDINAMRSALSECRKTGDDVAAVILEPIQGEGGVILPPAGYLPAVRQLCDEFGALLILDEVQTGMGRTGKMFACEHENVQPDILCLAKALGGGVMPIGATVATEEVFSVLFDNPFLHTTTFGGNPLACAAALATINVLLEENLPAQAEQKGDMLLDGFRQLGREYPDLVQDARGKGMLMAIEFVDNETGYSFASEMFRQRVLVAGTLNNSKTIRIEPPLTLTIEQCELVLKAARQALAALRVSVTEA

SEQ ID NO: 295 - protein, 459 aa, Artificial Sequence
  Neisseria arctica
MQKTSPASRNLDEAYLEASRMLDIVNTPEEQLNDEQRHWVSSQVAENFANHVNRGFLNYRKSVTETTDFALTDWCGEGSILRDIMGREYIDMLGGFGLYSPGIRHPKIVAAVKAQLDRSPQYSQEMLDPLRGQLAKVLAKLTPGNLQYGFFANSGTEAVDGAMKLAKLYTGRRGFISTTGGFHGKSLGALSLLGKFVYREPLLPLLGGIRHVPYGDADAVEQLLRIADSVGSMDVAAVVAEPVQGEAGAIVPPDDYWPRLREICSRYGVLLIADEVQTGFGRTGKVFGVDHWGVTPDIICFGKALGGGVVPMSGFFSSAEIWACLEPNPFMHTTTTGGNPLACAAALAGISVMLEENLPQQAAEKGEYLMKKIGMLRNKYPHILKDIRGKGLLLAMVFENDEIGYKVVSGLFKRNVLTSGTLNNSSVVRLEPALNISYELLDEVLLRLEDTLKSVSEAV

SEQ ID NO: 296 - protein, 492 aa, Artificial Sequence
  Citrobacter freundii
MVFIPIFAKRAGMAQSLQYLNQYHVIRELREHILNRLPSSASALACSAHALNLIEKRTLDHEEMKSLNREVIEYFKEHVNPGFLEYRKSVTAGGDYGAVEWQAGSLNTLVDTQGQEFVDCLGGFGIFNVGHRNPVVVSAVQNQLAKQPLHSQELLDPLRAMLAKTLAALAPGKLKYSFFCNSGTESVEAALKLAKAYQSPRGKFTFIATSGAFHGKSLGSLSATAKSTFRKPFMPLLPGFRHVPFGDVNAMRTMLSECKKTGDDVAAVILEPIQGEGGVILPPQGYLTAVRKLCDEFGALMILDEVQTGMGRTGKMFACEHENVQPDIMCLAKALGGGVMPIGATIATEEVFSVLFDNPFLHTTTFGGNPLACAAALATINVLLEQNLPAQAEQKGDMLLDGFRQLAREYPDLVHDVRGKGMLMAIEFVDNEIGYNFASEMFRQRVLVAGTLNNAKTIRIEPPLTLTIEQCDLVLRSTRKALAALRVSVEQM

SEQ ID NO: 297 - protein, 463 aa, Artificial Sequence
  Kluyvera intestine
MNTTELETLIRTILSEQLTPTQEKKESCTKGVFATPAEAIDAAHQAFLRYQQCPLKTRGAIIGGIRDELAPYLAELADESATETGMGNKEDKFLKNKAALENTPGIEDLTTTALTGDGGMVLFEYSPFGVIGSVAPSTNPTETIINNSISMLAAGNTIYFSPHPGAKKVSLKLIRIIEDIAFRHTGIRNLVVTVAEPTFEATQQMMAHPKIALLAITGGPGIVLMGLKSGKKVIGAGAGNPPCIVDETADLVKAAEDIINGASFDYNLPCIAEKSLIVVDCVADRLMQQMQAFGALRITGADIDKLRAVCIQDGVANKKLVGKSPSHILQAAGLSVPPKAPRLLIAEVQGNDPLVTAEQLMPVLPVVRVNDFDAALALALVVEEGLHHTAVMHSQNVSRLNLAARSLQTSIFVKNGPSYAGIGVGGEGFTTFTIATPTGEGTTSAKTFARSRRCVLTNGFSIR

SEQ ID NO: 298 - protein, 455 aa, Artificial Sequence
  Peptostreptococcaceae bacterium oral
MLDPNSMVNELIRRARTAQTEFETYSQERVDKAVRAIGKSIYDHGDELAKMGAEESGMGRYEDKIVKNQGKSKMTWWRLKGVKSRGIINIDREKQIYEIAKPIGVLGVVTPATNPTMTPVHNAMIALKGANAVIICPHPKTRKTTSKTVEYMRLALKDISVPEDLIQIVDDPSIEVSQALMAFCDTTISTGGPGMVKSAYSSGKPAIGVGPGNVQCLVGDDADIDAIVPKIMKGRTYDNGVLCTCEQSIICAENLYDRLVKGLVDNGAYFVKEDEVEKLRNGFFPGGVMNKNLVGSSPFEIAKASGFEVQEESKILLVPVSKTGKDEFLAKEKLAPILALYKYSEWKEAVDIALKNLLNEGRGHSVVIHSANKTNIEYAANILPVSRVGVGMVGSSGLGGGFDNGFMPTATLGCGSWGNNSIAGNVWWNHLVNITKLAYVLNDVSIPTDEEIWAE

SEQ ID NO: 299 - protein, 452 aa, Artificial Sequence
  Anaerocolumna jejuensis
MNQIIQSLVERSRKAQQILYTYNQEKTDEIVEMFASVVFNHAEPLARMAVEESRMGVYEDKITKNKEKAKTIWNSLKGKKSIGIIGREEEAGLIEIAKPMGVIAAAMPCTNPIITPMCNAMFAVKCQNTIIVAPHPRGKKCAMALAELYYKELDGMGVPRDIFLVVEEPTIDLTTELMSACDTVIATGGMGVVKSAYSSGKPSYGVGPGNVQGLIDEGIDYRAAAGRMIASRIFDNGILCTSTQSIIAPEKDYESVIKEFVAQGAYYIDDPAVIASLSEVVFPGGVINKNVVGQSVKTIAGLAGISIPEGTKVIIVKPERHGAGVVWSREKMCPMMTAYSYKTWEEAVQIAYDNLLVEGEGHTADIQSDNQAHIEYAGVKLPVSRVVVNQSCSVMAGGAFGNALNPSATLGCGSWGNNAISENLFYTHLMNKSRIAFVRKNWKQPSDEEIFA

SEQ ID NO: 300 - protein, 475 aa, Artificial Sequence
  Bacillus soli
MQINETDIKKMVEQVLKQLGESQPASAPAASLKDVSYGDGVFATVDEAAEAARLAWEKLRKLPLAARRQMIENMREVSRQHVNELATLAVEETKLGRVEDKVAKILLAVNKTPGVEDLVSTAFSGDDGLTLVEYAPIGVFGSITPSTNPAATIINNSISLVAAGNTVVYNPHPSAKRVSIKTLQLLNQAIVAAGGPENTLTSVAAPNLETSAQVMNHPKVHALVVTGGGPVVKAAMAVGKKVIAAGPGNPPVVVDETAIISKAAADIVQGASFDNNVLCTAEKEVFVVDKVANALKAEMVKSGAMELKGFQLEKLLEKVLVKKNDKFYPNRDLIGKDAAVILQAAGIQASPSVKLIIAETTKDHPLVMTEMLMPILPIVRVSNVDQAIELAVIAEKGNRHTAVMHSQNITNLTKMAQEIQATIFVKNGPSVAGLGFESEGFTTLTIAGPTGEGLTSAKTFTRQRRCVLVDGLRII

SEQ ID NO: 301 - protein, 496 aa, Artificial Sequence
  Desnuesiella massiliensis
MNITENDIEKIIQQVLVNITSKPSEDVKKDATPEVKAEATPLRKKYLGVFEKAEDAIEAASKAQKKLLKEFKIEDRERFIISIKKATVANAEILARMIIDETGMGKYEDKVLKHKLVSEKTPGTDILTTEAWSGDNGLTIVEMAPYGVIGAVTPSTNPSETAICNSIGMIGAGNSVVFNAHPGAKECVAYAVDMMNKAIVEAGGPENLITMVAEPTMESLEAIMKHPEIRLLCGTGGPGLVKTLLSSGKKAIGAGAGNPPVIVDDTANVKKAGKDIIEGCSFDNNLPCIAEKEVFVFENVADDLIYHMLQNKAYMLTKNQVEELVKIVLHENIEEKAVGCSLDRKRHYVINKKWVGKDAALYLKALGIEGKDDIQCLICEVDLDHPFVMTELMMPILPIVRVKGIDQAIAYAKKAEHGNRHSAHMHSKNVDNLTRFAREIETTIFVKNAKSFAGVGFGGEGFTTFTIAGPTGEGITSARTFTRQRRCVLAEGFSII

SEQ ID NO: 302 - protein, 469 aa, Artificial Sequence
  Caldanaerobius polysaccharolyticus
MAGIREEDIELIVRRVLSNLDLKNLKAAVKKDIGVFEDMKQAISAAKKAQKELKSMSIEFREKIIQNIRKKTLENARIMAEMGVQETGMGKVEHKVLKHELVARKTPGTEDIITTAWSGDKGLTLVEMGPWGVIGAITPSTNPSETVICNSIGMIAAGNSVVFNPHPGAVGVSNYAVRLINEAVVEAGGPPNLAVSVAKPTLETAEIMFKHPDINLLVATGGPGVVTAVLSTGKRAIGAGAGNPPVVVDETADIRKAAKDIVDGATFDNNLPCIAEKEVIAVNKVADELIYYMKQNGCYMASKEEIEELKAMVLQTRDGKYYLNRKWVGKDASTLLKGIGVDVDDKVRCIIFEATKDHPFVVEELMMPILGIIRAENVDEAIAIAVELEHGFRHSAHMHSKNVDNLTKFARAIDTAIFVKNAPSYAAIGFGGEGYCTFTIASRTGEGLTSARTFTKSRRCVLADGLSIR

SEQ ID NO: 303 - protein, 472 aa, Artificial Sequence
  Cellulosilyticum sp. I15G10I2
MNEIELKQVVEEVVRKLGVPSATAPKTAPTIGLGQGVFESMDEAITAAKAAQEDLHMMPLEFREKIIARIREKIMANKETLAKMAVHETGMGKIGHKILKHELTAKKTPGTECIKTRAWSGDQGLTVIESGPFGVVGAITPSTNPSETVFCNAIGMIAAGNTVVFNSHPNAARTSNFAVQLVNEAAVEVGGFENLATSVLKPTVESGNTLFKHPDIQLLVATGGPGVVKAILQSGKRGIAAGAGNPPVLVDETANIKKAAADIINGATFDNNLPCIAEKEVIVVNEVADELIHYMTSENDCYMLKGEQIEKLAQTILVEKNGHYIVNRDYVGRDAHVILKGIGIEAPESIRCIIFEASKEHILVVEELMMPVLGIVRVANVDEGIAVAKVLEGGNRHSAHMHSSNVYNLTKYGRALDTAIFVKNAPSYAGIGFGGEGFATFTIASKTGEGLTNAASFTKSRRCVMADALYIR

SEQ ID NO: 304 - protein, 455 aa, Artificial Sequence
  Geosporobacter ferrireducens
MIVKKILTEITLKNEATDSAYGIFDHMEEAIEAAWIAQKELVKYSLECRGKFIAAMRAAARKNIELFSKMAVEETGMGRYEHKVMKNTVAIEKTPGIEDLKPDAVSGDHGLTVFELSPYGVIGAITPTTNPTETVICNAIGMIAAGNAVVFAPHPRAKNTSRKAIEILNQAIIEAGGPANLITAIKEPTIESANIMMQHKKIKMLVATGGPDVVRTVLSSGKKAIGAGAGNPPAVVDETADIEKAAKDIIDGCSFDNNLPCVAEKEVIVVDSVADYLIFNMQKHNAYLLSDENLIKKLEKLVFNDKGHLNRDLVGKDADYILRKIGVDCDPSIRAIIVETDKNHDFVQEELMMPILPIVRVKDVNEAIELAVEVEHGYRHTAIIHSKNIDNLSKMAKEIQTTIFVKNGPSYAGIGVGGEGYSTFTIAGPTGEGLTTAKSFTRSRRCVLVDGFSIR

SEQ ID NO: 305 - protein, 465 aa, Artificial Sequence
  Bacillus korlensis
MIEVKQIEDIVMQVLAGLNNHEDPPLDGENGLYSEMNDAIDAAFVAQKELVKLSLAERGRIIESIRTEFRKHIELLSEMAVEETGMGRVKDKINKNLVAVNNTPGIEDLTTAACSGDNGLTVEELSPYGVIGSITPTTNPSETIICNTIGMLAAGNAIVFSPHPTAKRTSIETIKIISKAISKAGGPKNLVVSTLQPSIEQANIMMNHKKVRMLVATGGPAVVKAVLSTGKKAIGAGAGNPPALVDETADIEKAAKDIIDGCSFDNNLPCVAEKEVIAVDCIADCLIENMKNNGAYQLTDPVQIQRLVDLVVRNGHANKDFVGKNADFILRQLGIEVGPEVRVVIVDVKYEGRHPLVLAELMMPVLPIVRVNNVDEGIDLAVEVEHGFRHTAIMHSKNIDNLTKFAKEIQTTIFVKNGPSYAGIGVGGVGYTTFTIAGPTGEGLTSAKHFARKRRCVLVDGLSIR

SEQ ID NO: 306 - protein, 459 aa, Artificial Sequence
  Acidaminococcus massiliensis
MEQAVKDYLDKMVAASRIAQQEFATYPQETVDKAVRTVGKAIYDNAELLAHMAVDETKMGNYADKIAKCVNKSKSVWWRMKDKKSRGIIKRIPELGLVEVAKPIGVIGCVAPTTNPVINVMQNAMCALKCGNSMIVSPHPRAKHSSVKTVEVINEALAALGMPKNLIQVITEPSMELSAGLMSAVDLCICTGGPGLVKAAYSSGKPAIGVGQGNVQVLVDRDADLDQVAAMVIKGRTFDNGVLCTCEQNVICPEDKKEEMIAALKKHGAYYIGNSEDAAKLRDTAFPNGGPVSKEYPGASVKKIAQLSGIQGIPEDAKVIVSCTRGYGKDEPLAKEKLFPVLAFFTYDKWEDAIHIAKTNLEMEGIGHSVVIHSNTPEHIEAVAEAIPVSRFAVNQVGGTNLGGAMDNGLNPTTTLGCGTWGNNSISENFTYYHLMNLTRVSYRVPDMYIPTDEEIWAE

SEQ ID NO: 307 - protein, 462 aa, Artificial Sequence
  Lachnospiraceae bacterium 32
VSVNEKMVQDVVKEVMAKLQLAAGASEGKGIFADMNDAIAAAKKAQRYIHRMSMDQREQIISNIRRKTKENAEILARMGVEETGMGNVPHKILKHQLVAEKTPGTEDITTTAWSGDKGLTLIEMGPFGVIGAITPCTNPSETIICNTIGMLAGGNTVVFNPHPAAVKTSQFAVNMLNEASIEAGGPENIACTVGKPTMESSNIMMKHKDIQLIAATGGPGVVTAVLSSGRRGIGAGAGNPPALVDETADIRKAAGDIVNGCTFDNNLPCIAEKEIVAVDSVVSELMHYMVNEQDCYLASKEEQDKLTATVLTPKGLNRKCVGRDAKTLLGMIGVTVPDNIRCIVFEGEKEHPLIATELMMPILGVVRAKDFEDAVEKAVWLEHGNRHSAHIHSKNIDNITRYAKAIDTAILVKNAPSYAALGFGGEGFCTFTIASRTGEGLTSASTFTKRRRCVMSESLCIR

SEQ ID NO: 308 - protein, 462 aa, Artificial Sequence
  Eubacterium plexicaudatum
VSVNDQMVQDIVRQVLANMRISSDASGSRGVFSDMNEAVEAAKKAQAVIGKMPMDHREKIISSIRAKIMENAEILARMGVKETGMGNVGHKILKHQLVAEKTPGTEDITTKAWSGDRGLTLIEMGPFGVIGAITPCTNPSETILCNTIGMVAGGNTVVFNPHPAAIKTSIFAVNLVNEASVEAGGPDNIACTVEHPTLDTSAIMMKHKDIHLIAATGGPGVVTAVLSSGKRGIGAGAGNPPALVDETADIRKAAEDIVNGCTFDNNLPCIAEKEIVAVDSIADELMHYMISEQGCYLASAKEQEALISVVLKGGQLNRDCVGRDAKTLLGMIGVQAPDNIRCITFEGPKEHPLITEELMMPILGVVRADSFEDAVEKAVWLEHGNRHSAHIHSKNVDHITTYAKAIDTAILVKNGPSYAAIGFGGEGYCTFTIASRTGEGLTSASAFTKRRRCVMCDSLCIR

SEQ ID NO: 309 - protein, 462 aa, Artificial Sequence
  Clostridium sp. KNHs205
VNLKEAQVKDIVRKVLLQMEASNKEEQKLSGIFTEMNDAIGASIKAQKVMQQLSMDSREKIISNIRKKTLENAELFARMGVEETGMGNVGHKILKHQLLAEKTPGTEDISTVAWSGDRGLTLVEMGPFGVIGAITPCTNPSETILCNSIGMIAGGNTVVFNPHPAAIGVSNLAVHMVNEASREAGGPDNIAVSVVKPTLASGDIMMKHQNIPLIVATGGPGVVTTVLSSGKRGIGAGAGNPPVLVDETADIRKAAMDIVNGCTFDNNLPCIAEKEVVAVGKIMDELLHYLIENGCYVISKEEQEKLTAVVLKDNRLNRKCVGKDARTILSMIGIETPENIRCIIFEGEKEHPLIAEELMMPILGIVRAKDIDDAIEKAVWLEHGNRHSAHMHSKNVDNLTRFGKAVDTAIFVKNAPSYAALGFGGEGFCTFTIASRTGEGLTSARTFTKQRRCVMADSLCIR

SEQ ID NO: 310 - protein, 470 aa, Artificial Sequence
  Robinsoniella peoriensis
MAINEQEIQDIVRSVLKGMGTTADKPAGSSKKLLGVFDDINDAIAAAKEAQKEIQPMPLEFREKIISNIRKKTLENAKMFAELGVEETGMGNVGHKILKHQLVAEKTPGTEDLSTVAWSGDRGLTLVEMGPFGVIGAVCPSTNPTETVVCNSIGMIAAGNTVVFAPHPSAKNVSNLAIDMINRASVEVGGPENIAVAVKEPTMEVSKVIFSHKDISLLVATGGPGVVTTVLSSGKRAMGAGAGNPPVLVDETANIPKAAEDIINGCTFDNNLPCIAEKEVVAVDMIADELIYHMEQVGCYHANAEEVQKLIQTVFIENNGKRTLNRQCVGRSAKVLLGKIGVTVGDEIRCIIFEGEKTNPMIWEELMMPILGIVRVKNVEEGMGIALELEHGNRHSAHMHSTNVNNLTKFGKMIDTAIFVKNAPSYAALGFGGEGYPTFTICSRTGEGLTSAKNFTKSRRCVMGDALCIR

SEQ ID NO: 311 - protein, 469 aa, Artificial Sequence
  Caldithrix abyssi
MHLDDKQIAQIVETVLSRLERNESRTGRSRHPQGVFETLDEAVEAARQAQKKIRKLELRAKIIQAIRQAGVKHARELAEMAVQETGMGRVEDKIAKNISQAEKTPGIEDLQPLALSGDHGLTLIENAAWGVIASVTPSTNPGATVINNSISMIAAGNAVVYAPHPAAKKVSQRAIEILNKAIEAAGGPATLLTTVAEPSIETAQKLFVYPGIDLLVVTGGEAVVKAARKVTDKRLMAAGAGNPPVVVDETADIAKAARDIVWGASFDNNIVCADEKEIIAVDAIADRLKEEMKKHQAVELTPQQGEELAQIILEDYPGPNARINRKWVGKDAYKFAREIGLNVSKETRLLFVEADKDHPFAQLELMMPVIPLIRAADADKAIDLAIELEHGYRHTAAMHSRHIDHMDRMANEINTSIFVKNGPCLAGLGFGGEGWTSMTITTPTGEGVTSARSFVRLRRCVVVDHFRIV

SEQ ID NO: 312 - protein, 479 aa, Artificial Sequence
  Sporomusa sphaeroides
MTIDPNLIAKIAAEVMARVQERQPETVSAGEGIFPTVDEAVAAARAAQKQLKKLSIEKREELIQAMRQAACDNAELLAEMGVSESGMGRVSDKVIKNRLAATKTPGTEDLKSEAWSGDRGLTLIEMGPYGVIGSITPTTNPSETVICNGIGMIAAGNAVVFSPHPTAKNTSLVTIKLLNKAIIQAGGPPNLLTAVAEPSLAATNAMMQHPDINMLVATGGPAVVKAVMSCGKKAIGAGAGNPPAVVDETADIEKAAKDIIDGCSFDNNLPCIAEKEVIVVGSVADKLMAYMQRYGAYLISGPDVDRLAKVILTEKAELAAAGCTEKPKKSYAVNKNYVGKDARYILSQIGIQVPDSIRAVICETPADHPFVVEELMMPVLPVVQVKDIDAAIELAVKVEHGNRHTAIMHSKNVDNLTKLAKAIETTIFVKNAPSYAGIGVGGEGFTTFTIAGPTGEGLTSPRSFTRQRRCVLVDALSIV

SEQ ID NO: 313 - protein, 524 aa, Artificial Sequence
  Bacillus sp. FJAT-25547
MGVNMSEQDIQKIIQSVLQNIEAVSEQNSGHQVLHSNDNTNPPKPLKMKRVLPLSQQINTAELSHQVNEPGANGVFVRIEDAIEAGYIAQLNYVKHFQLKDREKIIAAIREAVIENKEKLAQMVFEETKLGRYEDKIAKHELVASKTPGTEDITTAAFSGDEGLTIVEQAPFGLVGAVTPVTNPTETIINNSISLLAAGNAVVLNVHPSSKASCAFVVNLINQAIQDAGGPKNLVSMVKDPTLETLNRIIESPKVKLLVGTGGPGMVKTLLKSGKKAIGAGAGNPPVIVDETADLKQAAKSIIEGASFDNNLLCIAEKELFVIDSVADDLIFQMLNEGAYMLDQQQLSKLMSFALEENVHQEAGGCSLDNKREYHVSKDWVGKDAASFLRQIGVACEENIKLLICEVDFDHPFVQLEQMMPVFPIVRVGDLDEAIEMALLAEHGNRHTAIMHSKNVDHLTKFARAIETTIFVKNASSLAGVGFGGEGHTTMTIAGPTGEGITSAKTFTRQRRCVLAEGGFRIIG

SEQ ID NO: 314 - protein, 471 aa, Artificial Sequence
  Dorea sp. D27
MEISTSQISRYILDLQNELKGDSPSPAHMSAGEHGIFQDAECAIMAASQAQKRLMEYSLKERETFIEAMRAAARENARKLAETAHDETGYGHVEDKVAKNVLAADKTPGIEDLNTMAVSGDAGLMLTEMAPYGVIGAITPSTNPTATVINNGIGMIAGGNAVVFNPHPGAKKASLLTIKLMNEAIVGAGGPDNLLCAPEEPTLDTSSVIMSHPLVKLLVVTGGEAVVRTAMKTGKKCIAAGPGNPPVVVDGTADIKRAAADIVKGAHYENCILCIAEKEILVESCVADELIREMVKEGAYLADEKELSAIVGKVMITAKDGSYAPNKKYVGRDATYILKEAGICVDREAKIIIAEVPFGHPLVMTEMLMPVIPVTRVATVEEAIEKAVIAENGCHHTAMMHSENVSNLTKMARAADTTIFVKNAPSYAGLGIDGEGYTTLTIATPTGEGLTSARNFTRSRRCTLHGSFRIV

SEQ ID NO: 315 - protein, 448 aa, Artificial Sequence
  Enterococcus phoeniculicola
IMNTLSDKILRGRQAMQSISNYTQEQVDEMLSVISKTIFDHAEELAKEAVEETGLGNYEHKIGKNQNMAINIFSHLKGKKSVGIIQTLKEEGVVEIAHPVGVIGSVTPTTNPTITPLGNGLMALKGKNAMIVSPHPRAKKTTKHTIDLMRSALESIHAPKDLLQVIEEPSLELSQQLMRESDVIVATGGPGLVRAAYSSGKPAFGVGPGNVQAILDDDFDINLAAELTVIGRSFDNGIVCACQQSLLYPEKKEEELFQALENNKAYIIKEEIDVQKMRELLFPGGKSNPDLVGQTATFIAEKAGIKVPEDTIILAVKVTTSGQEELLVKEKMNPVLVVKGCESFEEALLDAKNNLWVEGAGHSTGIFSNNEQHILSAGETLPVSRVVVNQPTIDAGGSPTNGLNPTVSLGCGSWGNNSISENLSYHHLINISRIAYPISPKHTETPWN

SEQ ID NO: 316 - protein, 462 aa, Artificial Sequence
  Blautia schinkii
MPISDSMVQEIVQEVMAKMQIADAPAGKHGVFKDMNEAIEAAKKTENIVKRMSMDQREKIITCIRKSIKKNAEIMARMGVDETGMGNVGDKILKHHLVADKTPGTEDITTTAWSGDRGLTLVEMGPFGVIGAITPCTNPSETILCNTMGMLAGGNTVVFNPHPAAIKTSIYAVNLLNEASLEAGGPDNIAVTVEQPTLETSNIMMKHKDIPLIAATGGPGVVTAVLSSGKRGIGAGAGNPPALVDETADVRKAAQDIVNGCTFDNNLPCIAEKEIVAVSPIVDELMHYLVSENDCYLASKEEQDKLTEVVLAGGRLNRKCVGRDARTLLSMIGVNVPANIRCIVFEGPKEHPLIATELMMPILGVVRAKDFDDAVEQAVWLEHGNRHSAHIHSKNIDNITKYAKAIDTAILVKNAPSYAALGFGGEGYCTFTIASRTGEGLTSASTFTKRRRCVMSDSLCIR

SEQ ID NO: 317 - protein, 472 aa, Artificial Sequence
  Clostridium intestinale
MSIDATLVEKLVRQAIEEAKSKNLISFNKVETLNNYGIFNTMDEAIEASDVAQKELLNTSMANRQKYINIIKSTVLKRENLELISRMAVEETEIGRYEHKLIKNRVAAEKTPGTEDLVTEAITGDNGITLIEYCPFGVIGSITPTTNPTETIICNSMSMIAGGNTVVFSPHPRAKNVSIKLITMLNKALEEAGAPKNLIVTVKEPSIENTNAMMDHPKVRVLVATGGPAIVKKVMSTGKKAIGAGAGNPPVVVDETANVEKAAIDIVNGCSFDNNVPCVAEKEVFAVDQICDYLIHYMKLNGAYEIKDRNTIQKLLELVTNENGGPKVSFVGKNASYILSKLGINVDDNIKIIIMEVDKDHHFVKEEMMMPILPIVRTRDVDEAIEYAYVAENGNRHTAIMHSKNVDKLTKMARLLETTIFVKNAPSFAGLGVGGEGNTTFTIAGPTGEGLTTAKSFCRKRRCIMVDAFNIR

SEQ ID NO: 318 - protein, 483 aa, Artificial Sequence
  Massilioclostridium coli
MVFSQNQIDSIVQSVVAQMQGTTPTSAPAYDSTQYNGRQYLGVYATMEEGIDAAADSYKVIRNMSVEQREKIITEIRKLTRAEAEIMAKLGVEETKMGRVEHKTLKHILVADKTPGTEDIQTEAQSGDGGLTLVEMAPFGIIGAITPSTNPSETVICNSIAMIAAGNAVVFNPHPGAIKVSNYAVDLVNRASLAAGGPASLVCSMVKPTMQTADVMYKDPRVRMLVCTGGPGVVKSVLSSGKKAIGAGAGNPPVIVDDTADIKKAAKDIIDGCTFDNNLPCIAEKEVFAFSNIADELMYNMQQNGAYFITAAQADELAKIVLVEKKNEKTGKITYSVSRDWVGRDAKKFAAALGIEVDDSVRCLICEVEEDHLFVQTELMMPILAVVRVKDIDEAIEKAVRAEHGNRHSAHMHSKNIENLSKFAKAIETTIFVKNAPSYAGIGFGAEGHTTFTIAGPTGEGLTSARSFTRKRRCVMKDMFHII

SEQ ID NO: 319 - protein, 466 aa, Artificial Sequence
  Cloacibacillus porcorum
MNIDAALIEGIVKGVMRKIDESENNSAGSCGIFADMNDAIEAAAAAQRRYLDCSMADRARFVEAIRGTVLNEENLKFMSLSTIEETGMGNYEHKLVKNRLAATKTPGIEDLTTDAITGDDGLTIVEYSPFGVIGAITPTTNPTETIICNSIGMLAAGNTVVFSPHPRAKKVSLWLVSELNRALAAAGAPANLIVTVSEPSIENTNLMMAHPKVRMLVATGGPAIVKTVLSSGKKAIGAGAGNPPAVVDESANIEKAAKDIVDGCSFDNNLPCIAEKEVIVVDSAADYLIFNMKKNGAFEVKDPAVIERLVGLVTKEGKSPKTEFVGKSAKYILEKAGVEAPEDTRVIIMEAREEHPFVQVELMMPILPIVRADNVNEAIEMAVRVEHGNRHTAMMHSRNVDSLTKMAKLIQTTIFVKNGPSYAGIGVGGMGHTTFTIAGPTGEGLTSAKTFARRRRCVLVGGMDIR

SEQ ID NO: 320 - protein, 500 aa, Artificial Sequence
  Sporosarcina globispora
MQEMRDAVKRAKEAQLEYMAFTQEQVDEIVKNAADAAYAKSLYLAQMAVEETGMGIVEHKKIKNEVGSKAVYESIKDEKTVGIIREDRVNKVTEIAYPYGVVAGIIPTTNPTSTAIFKALISLKTRNAIVVSPHPRAVKCTVEALKIVNEAAIQAGAPEGLIGWISKPSMGATNELMKHRDISLILATGGGGLVRAAYSSGKPAYGVGPGNVPCYIEKTAKVAQSVKMIIDSKSFDNGTICATEQSIVADRNIKEMAMRELKNNGAYILNSDEKAALEKIISPSPGKLNPDIVGQSAVKIAAMAGIQVPNDTRVLIAEETKVGKDIPFSIEKLSPIFAFYTAESYQDAKEICLQLLNLGGRGHSLSLHTNDDAVAKDFALEMPVSRILVNTLSSIGAVGATTGLMPSLTLGCGSFGGNITSDNVTARHLINTKRMAYGTKEVTVPKPAASSSIAEKEQAGSQDVDHIVSQVLQQVSPGGEVDAKMIADMVNQVMKKYQTN

SEQ ID NO: 321 - protein, 528 aa, Artificial Sequence
  Rhodobacter aestuarii
MKDIDIENAVARVLSGYTGPAETPAPAPTSKPGTTGCVWEPVKAVDPVDDIIGGMLTRALGERNCSNCKAGDCQGKAGCLSISDAEALELGDGVFATMDEAVNAAAEAQRKYLFCTMGDRKRFVEGIRAIFTDEAVLERISRLTVEQTGMGNLAHKIIKNRLAAEKTPGVEDLTTEAQSGDDGLTLVELSPFGVIGAITPTTNPTETVICNSIGMLAAGNAAVFSPHPRAKGVSLLAIKLINRKLAALGAPANLVVTVQAPSIDNTNAMMAHPQVRMLVATGGPGIVRTVMSTGKKAIGAGAGNPPVVVDETADIPKAAQDIVNGASFDNNMPCIAEKEVIVVDQVADFLISEMQRNGAWLASDPSVVERLAQLVLTEKGGPQTGCVGKSAAWLLGQIGIQVGPDVRLIILETTKDHPFVQEELMMPILPVVRVPDVDTAIDLAVDLEHGNRHTAMMHSTNVRKLTKMAKLIQTTIFVKNGPSYAGIGVGGEGYTTFTIAGPTGEGLTSPRSFARRRKCVMVEALNVR

SEQ ID NO: 322 - protein, 468 aa, Artificial Sequence
  Clostridium grantii
MAINESQIEEIVKQVLLNVSGTTKVKNENKAIGIFEDIEEAIDAAKIAQKKIKKMSMEQREKIITRIREKTRENAKIMSEMAVEETGMGRVDHKILKHLLVADKTPGTEDITTTAWSGDNGLTLIEMGAFGVIGGITPSTNPSCTVLCNSIGMIAGGNTVVFNPHPGAVKVSNYAVTLVNEASVECGGPENIACSVTKPTLDSGKILMTHKDIALLAVTGGPGVVTAALKSGKRALGAGAGNPPVVVDETADLQSAAKHIVDGATFDNNLPCIAEKEVVAVESIVEELKYHMINNGCYELKGSDIDKLVNTVLINNNGIIGLNRDCVGKDAKVILKKLGIEVDDSIRCIIFDADEDHILVLEELMMPILGIVKVENVDEAIKLAVRYEHGNRHSAHMHSKNIDNLTKYGREIDTAIFVKNAPSYSALGFNGEGYCTFTIASRTGEGLTSGKTFTKSRRCVLSDGLSIR

SEQ ID NO: 323 - protein, 449 aa, Artificial Sequence
  Collinsella sp. GD7
VAEFIERARVAQAEFETYSQEEVDRAVRAIGKAVFDAAEPLAKLAVEETRMGRYEDKIAKNSGKTKITWDRLKGVKSRGIIARHEDEGIVEVAKPMGVIGCIPPTTNPTMTPAHNAMCALKGGNALLISPHPRAKKTGVETVRIMREALEAMGAPADLIQIIPDPTLEISSLVMSMCDCTIATGGPGMVKAVYSSGKPAFGVGAGNVQTIVDTDADLELSAQQIVRSRTYDNGVLCTCEQCIHVQEDIYGEMVRLFQQEGAFYISEQADVDALRAALFPNGAINKDAVGASPQFIGSLAGLDVPEDAKLLMVKVDAYGADELLCKEKLCPVMCVASYGTWEEGVANAKTNLLHEGAGHSAIVRSHTAEHVDYAGEQLPVSRIGVNMIGSSGLGGAFDNGLNPTATLGCGSWGNNSISENLWWHHLVNIARIAVALPDVQVPSDEEVWGE

SEQ ID NO: 324 - protein, 471 aa, Artificial Sequence
  Clostridium estertheticum
MEIKNDEISAMVEKVLQEMNRRDLNVSESDGVFDDMDEAIEAASIAQKELICMSISQREELISAMRKAILDNATKIADICVEDTGMGRKDHKYLKLKLVANKTPGTEVLKTMAISGDKGLTLIEMGPFGVIGGITPSTNPSATVMCNSIGMIASGNAAVFSPHPGAIESCLISVRVLNKAITDAGGPRNLITTLRKPSLESTDTMINNPKIRLVVATGGPFIVKKVLSSGKKAIGAGAGNPPVVVDETADIVKAARDIIAGCCFDNNLPCIAEKEAIVVESVYEKLIAEMLKNGNVYELDEQQKQKVLDVVMNKTEKGGKIKYGVNKNFVGKDASVILAAAGIEAPKGVECLICRAENLHPFVQEELMMPILAIVKVKDVDEAINTAVLDEHGNRHTAMMHSKNIDNLTKMSRLIDTTIFVKNAPSYAGIGFGGEGWTTFTIAGPTGEGITNATSFTRQRRCTMVDSFRII

SEQ ID NO: 325 - protein, 483 aa, Artificial Sequence
  bacterium MS4
MDIDANLIEKMVKQVLNEIDAGKAEKTAAAEIKKEEKGGAYGIFNTMEEAIDACDIAQKQYLFCSMAERQKYVQTLRDVVLKQENLELISRLAVEETGMGNYPHKLIKNRLAAEKSPGIEDLETTALSGDDGLTLVEYCPFGVIGAITPATNPTETIICNSIGMLAAGNSIVFSPHPRAKDVTIRLVTMINRALEETGAPKNLIVTVMEPSIENTNVMMKHPKIRMLVATGGPGIVKLVMSTGKKAIGAGAGNPPVVVDETADIKKAAIDIVNGCSFDNNLPCIAEKEVIAVDRITDELIRSMRENGAYQVTDPAVIQKLADLVRKEGGGPKTSFVGKSAIYILDKIGIQAGPEVKVIIMETPKDHPFVMEELMMPILPIVRTRNVDEAIDLALIAERGNRHTAMMHSKNVDKLTKMAKLLQTTIFVKNAPSYAGIGVGGEGHTTFTIAGPTGEGLTSAKSFCRKRRCVLSDAFHIRDFSKGL

SEQ ID NO: 326 - protein, 462 aa, Artificial Sequence
  Clostridium glycyrrhizinilyticum
VSVNEQMVQDIVQEVMAKMQITSDVSGSHGVFKDMNEAIAAAKKTQKIVGKMSMDQREKIISNIRTKIKENAEIMARMGVQETGMGNVGHKILKHVLVAEKTPGTEDITTTAWSGDRGLTLIEMGPFGVIGAITPCTNPSETVLCNTIGMLAGGNTVVFNPHPAAIKTSIFAINLLNEASLEAGGPDNIACTVEKPTLASSDIMMKHKDIPLIAATGGPGVVTAVLSSGKRGIGAGAGNPPALVDETADIRKAAEDIVNGCTFDNNLPCIAEKEIVAVDSIADELMYYMVSEQGCYKITKEEQDALTAVVLKDGKLNRKCVGRDAKTLLGMIGVTVPDNIRCITFEGPKEHPLIAEELMMPILGVVRAKDFDDAVEQAVWLEHGNRHSAHIHSKNVDNITTYAKAIDTAILVKNGPSYAALGFGGEGYCTFTIASRTGEGLTSASTFTKRRRCVMTDSLCIR

SEQ ID NO: 327 - protein, 482 aa, Artificial Sequence
  Thermincola ferriacetica
MAIEAYQIEKIVEEVMKKMVSGGSGDSFAGKAKGIFESVDEAVKAAKAAQKELVAMRIEKREMLLKAMREAAIAHAEELARLAVEETGMGRVTDKIIKNRVAAEKTPGTENLQPSAVTGDRGLTLIERAPYGVIGAITPSTNPCATVINNSISMVAAGNSVVFSVHPGAKKASLLTVEILNEAIEKAGGPANVLTAVASPSLENTNALMKHPDIKLLVATGGPGLVKAVLSSGKKAIGAGAGNPPALVDETADLERAAKSIVAGASFDNNLPCIAEKEVIVVDYVANQLISYMKQNGAYLANDREIKALMDLVLTKNENLKAEGCTVKPEKLYGGINKEYVGKDAAYIMKKIGVDIPEDTKLIICEVDEDHPFVLEELMMPILPIVRVPNVQKAIEVGVRVEHGNRHTAVMHSQNIDNLSAFARAIQTTIFVKNGPSYAGIGIGGEGYTTFTIAGPTGEGLTAASSFTRQRRCVLVDGFSIV

SEQ ID NO: 328 - protein, 461 aa, Artificial Sequence
  Lachnospiraceae bacterium AC3007
MNEKLVQEIVRRVMADINDEGGADGMHGVFSDMNDAIEHALKAQEKVRVMTLDQREKIISAIRRKTNENVETIARMGVEETGMGNVGDKILKHKLTADKTPGTEDITTTAWSGDRGLTLVEMGPFGVIGAITPATNPSETVICNSIGMIAGGNTVVFNPHPNAKKTTIYTINMINEASLEAGGPDNIACTVQEPTMETSAIMMKHPKIPLLVATGGPGVVTAVLSSGKRAIGAGAGNPPALVDETADIEKAARDIINGCTFDNNLPCIAEKEVVAVDAIFDELMRHFEEENGCYRASREIQDKLIATVITPKGALNRKCVGRDAKTLLKMVGVDAPADTRCIIFEGEKEHPLIATELMMPILGVVRVKDFREGVETAVWLEHGNRHSAHIHSKNVDRITEYARALDTAILVKNGPSYAALGFGGEGYPTFTIASRTGEGLTSASTFTKRRRCVMTDSLCIR

SEQ ID NO: 329 - protein, 471 aa, Artificial Sequence
  Eubacterium sp. 14-2
MNIDERVVASIVNAVLGRLDDVSSPAAEAGGGNWGIFESMNDAVEAAAAAQKKYINCTMHDRAAYVQAIRDVVLKQENLEYISRQSAEETGMGNYEHKLIKNRLAATKTPGTEDLTTDAMSGDDGLTLVEYSPFGVIGAITPTTNPTETIICNSIGMLAAGNSVVFSPHPRAKNVSLHLIRLINRALAEAGAPANLVVTVSQPSIENTNAMMSHPMVRMLVATGGPGIVKTVLSSGKKAIGAGAGNPPVVVDETANIEKAGKDIIDGCCFDNNLPCIAEKEVIVVDSAADYLIFNMKKNGAYEVKDPEIIDRIVKLVVQENGKSPVTSFVGKSAKYILEQAGVHVDDDVRVIIAQTGEDHPFVQVELMMPILPIVRVPDVDAGIEMAVRVEHGNRHTAMMHSRNVDKLTKMAKLIQTTIFVKNGPSYAGIGVGGEGYTTFTIAGPTGEGLTSAKSFARRRRCVLVGGMDVR

SEQ ID NO: 330 - protein, 469 aa, Artificial Sequence
  Anaerosalibacter massiliensis
MELDKMDLEQIVNLVVEQLKGEDTSSYCKEESKNGVFNNMNEAIEKAYIAQKDFFKNYNLEDRRRIIKTIRKELMEDVELLAKLGVEDTGMGRYEDKLKKNKLVIEKTPGVEDLNSEVFTGDNGLTLVELSPYGVIGAIAPSTNPSETVICNSIGMIAAGNSVVFSPHPGAKNISMKTVELINKAIEKAGGPKNLVVTTSNPSIENAEIMMKHEKIKMIVATGGPGVVKSALSQGKKAIGAGAGNPPAVIDETADIEKAARDIIAGCSFDNNLPCIAEKEVIVVDSVADYLIFSMNKNNVYHLKDEEKIDKLASMVIDKNGRINRKFVGKDAKVILKAVDIECEHDVRAIIVETEKDHPFVVTELMMPILPIVRVKDIDEAIKLAVEVEQGNRHTAIMHSKNVDNLSRFAREIETTIFVKNAPSFAGLGFGGEGYPTFTIAGPTGEGLTSARSFARKRRCSLVGSFSIK

SEQ ID NO: 331 - protein, 473 aa, Artificial Sequence
  Clostridium indolis DSM 755
MEIGAKEIELIVREVLAGIESRGIKPSYTPSRSEDGVFERVEDAIEAAYAAQREWVEHYRVEDRRRIIEAIRVTAKSHAESLAKMVWEETGMGRFEDKIQKHMAVIEKTPGVECLTTEAISGDGGLMIEEYAPFGVIGAITPSTNPTETIINNTISMIAGGNSVVFNVHPGAKRCCAHCLKILHQAIVENGGPASLITMQKEPDMEAVSKLTSDPRIRLMVGTGGMPMVNALLRSGKKTIGAGAGNPPVIVDDTADVSLAAREIYRGASFDNNILCLAEKEVFVMERAADELVNKLIKEGAYLLSSLELSEILKFAMVEKNGSYEVNKKWVGKDAGQFLEAIGVSGHKDVRLLICETDRSHPFVMVEQLMPILPIVRLRTFEECVESALAAESGNRHTASMFSRNVENMTKFGKIIETTIFTKNGSTLKGVGIGGEGHTTMTIAGPTGEGLTCARSFTRRRRCMLAEGGLRII

SEQ ID NO: 332 - protein, 467 aa, Artificial Sequence
  Catabacter hongkongensis
MGLSEQQIKQIVEETVRNIGTGTAGAACSGSWMCDDANDAVENAKRAQKQLMTMTLEQRGRLVSAMREAALANSVKLAEMAHEETGYGSVEHKIMKNELAAKKTPGIEDLHTQAFSGDDGLTIVEQAPFGVIGSITPSTNPTSTVINNSISMVAAGNAVVYNPHPAAKRASQEAMRILNEAIVSAGGPATLITTVKEPTLESGQVIMNHRDIKMLSITGGEAVVAVAMKTGKKVVAAGPGNPPVIVDDTAVIPKAAKDIVDGASFDNNVLCVAEKEVFAFDNITDQLMSEMEKNGAYRVSGEDINKIVNTVLVLKDGHYVINRKFVGRDATYIMQESGVSYTGNPRLVIAEVSANHPFVTVEMLMPVLGVVRVRNIDEAVDEAFRAERGCQHSALIHSTNIRNMSKAASTMNTTIFVKNAPSYSGLGFGGEGYATLTIATPTGEGLTSAKTFTRARRCVLKGDLRII

SEQ ID NO: 333 - protein, 463 aa, Artificial Sequence
  Bacillus thermotolerans
MAVQERDLESIVKKVLEELSRKEETPEAGQGVFEDMNDAIEAAEQAQKELIKLSLEERGAIIEAIREASRKHVETFARMAVEETGMGNYEDKVRKNVLVIDKTPGIEDLKTEAVSGDNGLTVVELSPYGVIGSITPTTNPTETIICNSIGMIAAGNSVVFSPHPGAKDTSLKAVEIINQAIVEAGGPKNLITSIAEPSIDQANIMMRHKKVRMLVATGGPGVVKAVLTSGKKAIGAGAGNPPVVVDETADLEKAAKDIVDGCSFDNNIPCVAEKELFVVEAVADYLVFHMKKHGAFQLNDPKHVEKLTELVVDNGHANKEFVGKDIQYILKQIGVDAPQDARIAIMDVGADHPLVSAELMMPILPVVRTANVDEAIELAVEAEHGFRHTSIMHSKNIDNLTKFAKAIQTTIFVKNGPSYAGLGVGGEGYTSFTIAGPTGEGLTSAKDFARKRKCVLVDSLSVR

SEQ ID NO: 334 - protein, 511 aa, Artificial Sequence
  Gracilibacillus kekensis
MQLNEKDIQTIIDSVLKNVEAAVENRQPTQASGQSSEQQPIKMKQLSPSAPSNTFNMSSNKDGVFERVTDAIEAASKAQEVWMKQYTLEEKENLINSIRQAVAQQVNHFAKSALEETGLGNYEDKVLKLSLTVEKTPGTELLQTETFSGDDGLSFVEQTPFGVIGAVTPVTNPIDTIVNNGIGMIAAGNAVVFNVHPSAKKTSREMIQLLNQTIVNAGGPENLLTMVQEPTIETVQEIANHPSVKLLVGTGGPGMVKSLLKSGKKAIGAGAGNPPVIVDETADLKQAAKDIIEGASFDNNLLCIAEKEVFVLDQVADDLIFELLNQQVHMLDHQQLEKVMKLTLKENTEGIPGGCSYLSRDYLVSKDWVGKDATQILEQIGVSNVQTKLLICEVDAEHPYVQLEQLMPILPIVRVKSVDEAIEKAVKAEHGNRHTAVMHSNHIKNVTKFAKAIGTTIFVNNGSSLSGVGYRGEGFTTMTIAGPTGEGVTSARTFTRQRRTVIANGGFNIRG

SEQ ID NO: 335 - protein, 479 aa, Artificial Sequence
  Propionispora sp. 2/2-37
MIQEQELIAKITAQVIAQMQQGQAAAVPEHYGVFDSIDGAVAAARKAYQSLRALPLEKREQLVGAMRKTAYDHAEIMAEMAVTESGMGRYSDKVIKNRTAALKTPGTEDLKTRAWSGDCGLTLVEMGPYGVIGAITPTTNPTETLICNGIGMIAAGNAVFFSPHPTAKNTSIWTIQLLNKALVEAGGPPNLLTTVYNPSIAVANAMMKHPDVNMLVATGGPGVVKAVLSSGKKAIGAGAGNPPAVVDETADLEKAAKDIVAGCSFDNNLPCIAEKEVIAVGSIADRLMDYMVRNGAYKITPQQTAELVNLLLTVKEEKMAEGCTAKTKRTYGINKDYVGKSAQCILSKIGVTVKDDIRVILCEAEADHPFVLEELMMPVLPVVQVKDVDAAIELAVRVEHGNRHTAVMHSKNVDHLTRMARAIDTTIFVKNAPSYAGIGVGGEGYCTFTIAGPTGEGLTSPRSFTRARRCVLVDGFSIV

SEQ ID NO: 336 - protein, 478 aa, Artificial Sequence
  Clostridium chauvoei
VFSDEKSIEEIVIKVLEEIHTDRKTKCNKNCNSNCGCNKDKFIFSSVDDAVAAAKKSFFELKKLTIREREEIIKNIRKKCLDYADKLSIMAVEETGMGKVEDKVTKHILIAEKTPGTEDLKTTAWSGDGGLTLIEQGAFGVIAAITPSTNPTATVLCNAIGMISAGNTIVFAPHPNAVKCSNLAVKLINEASKEAGGPENIAVSFRKPSIDITTELMKHKDIALISATGGPGVVNQALSSGKRALGAGAGNPPVIVDETANIEKAAKDIIDGATFDNNLPCIAEKEVIVIDSVSNKLIEYMIKFGAYLLKDKEQIKRLEDKLLIKNGKKVTLNRDFVGKDAKVILDSIDILVDDSIKCIIFEGDKDSLLIKEELMMPILGIVKVNNFDEAVECALELEHGNRHSAHMHSKNIDNLTTFARVIDTAIFVKNAPSYSALGVNAEGFATFTIASKTGEGLSSTKTFTKNRRCVLSDGLSIR

SEQ ID NO: 337 - protein, 467 aa, Artificial Sequence
  10500A -Thermoanaerobacterium aotearoense
MKVKEEDIEAIVKKVLSEFNFEKNTKSFRDFGVFQDMNDAIRAAKDAQKKLRNMSMESREKIIQNIRKKIMENKKILAEMGVSETGMGKVEHKIIKHELVALKTPGTEDIVTTAWSGDKGLTLVEMGPFGVIGTITPSTNPSETVLCNSIGMIAAGNSVVFNPHPGAVNVSNYAVKLVNEAVMEAGGPENLVASVEKPTLETGNIMFKSPDVSLLVATGGPGVVTSVLSSGKRAIGAGAGNPPVVVDETADIKKAAKDIVDGATFDNNLPCIAEKEVVSVDKITDELIYYMQQNGCYKIEGREIEKLIELVLDHKGGKITLNRKWVGKDAHLILKAIGIDADESVRCIIFEAEKDNPLVVEELMMPILGIVRAKNVDEAIMIATELEHGNRHSAHMHSKNVDNLTKFGKIIDTAIFVKNAPSYAALGYGGEGYCTFTIASRTGEGLTSARTFTKSRRCVLADGLSIR

SEQ ID NO: 338 - protein, 462 aa, Artificial Sequence
  Ruminococcus sp. AT10
VSVNEQMVQDIVQEVLAKMQIASDVSGNRGVFADMNEAIAAAQKAQKVVARMTLDHREKVISNIRKKINENAEILARMGVEETGMGNVGHKILKHQLVAEKTPGTEDITTTAWSGDRGLTLIEMGPFGVIGAITPCTNPSETVLCNTIGMFAGGNTVVFNPHPAAIKTSIYAVNLLNEASVEAGGPDNIACTVEHPTLETSNIMMKHKAIQLIAATGGPGVVTAVLSSGRRGIGAGAGNPPALVDETADIRKAAEDIVNGCTFDNNLPCIAEKEIVAVESVADELLHYMIQEQGCYLASKEEQDALTAVVLKDGRLNRKCVGRDAKTLLGMIGVTVPDNIRCITFEGPKEHPLIATELMMPILGVVRAKDFNDAVEQAVWLEHGNRHSAHIHSKNVDHITKYAKAIDTAILVKNGPSYAALGFGGEGFCTFTIASRTGEGLTSASTFTKRRRCVMSDSLCIR

SEQ ID NO: 339 - protein, 469 aa, Artificial Sequence
  Acetobacterium dehalogenans
MNIDTTGIEYIVKKVMAEIDCADAGGKPLKDGELGVFNDMENAIDAAFTAQKTFMRESLAYRSKLIAAMRAEMLKKENMEMICQMAVEETGMGNYEHKLLKHELATVKTPGVEDLVAEAFTGDDGLTLIEQSPFGVIGSVSPSTNPSETVICNSIGMLAAGNTVVFAPHPSAKNTSALTVKLLNKAILEAGGPENLIVTTAEPTIDSANTMFASPKITLLCATGGPGVVKTVLQSGKKAIGAGAGNPPALVDETADIEKAGKDIIDGCCFDNNLPCIAEKEVVVVEQVADYLIFNMKKNGAYELKDAKKIAELEELVIPGGRLSRDYVGRSAKVILKGIGIDVDDSIRVIIMETSKDHIFAVEELMMPILPIVRVKNIAEGIDLAVALEHGNRHTAIMHSTNINNLTEMAKRVQTTIFVKNGPSYAGIGVGGEGYTTFTIAGPTGEGLTSAKTFTRKRRCVLVGGFTIK

SEQ ID NO: 340 - protein, 462 aa, Artificial Sequence
  Spirochaeta alkalica
IATLLERARAAQEKIATCTQREIDDLCLSVGWEVYTDENIAKLAECAVQTTGMGNVPDKITKHKVKVLGVLKDLRKARTVGLIERDEARGLSKYAKPVGVVGALLPVTNPTATPASNGLSILKGRNAVIFAPHPRGAAASALAVEFMRRGLRRVGAPEDLIQIVEDPSLGQTGELMKQVDLVVATGGGAMVKAAYSSGTPAYGVGPGNSVQIIAEDADLADAAAKIALSKAFDHATSCSSENSIIVEDSVYEGMITELVQNQGCYLTTPRERSQLEALLWRPGKTGQLALNPGIIARSAATIAAEAGITLPEGTRVILVEGQHPLEQDPFSQEKLCPVLTVYRYTRWEEAVDLLVRLTDQAGTGHSCGIHTFREDYIRHLGETMRTSRIMVRQAQAPANGGNFFNAMPSTVTLGCGTWGGNITTENIHWKHFINVTWVSEPIPPDRPDDEEIWGSFWSRYAE

SEQ ID NO: 341 - protein, 494 aa, Artificial Sequence
  Clostridium caminithermale DSM 15212
MQINELQIEKLVAEVLAKTLGAEGNSSLVNNNSIGNSNEYEYNQSLEVGVFEKMEDAINEAHRAYQQLKNYSIKDRQRFIDGIKEWTLREKNILAKKVVEETGLGNYEDKIIKHELAARTAGTEVLSSKVQSGDTGLALIEQAPYGVVGATTPSTNPSETVISNTIAMLAAGNTVVFNVHPSSKHVCAYTVAKINECIMDLGGPANIITMVKDPTMESLQVMANCPKINLLVGTGGPGLVRALLKSGKKAIGAGAGNPPVVVDSTANIKKAAADIIKGHSFDNNIVCILEKEVFVVDEVANELIENMKSEGAFYLDSSYISALTDLIIEATDKKFFLGNSSKTTNLHTKKEWVGKDAYKILDALGIRYSTRPKCIICEVPFEHPFVQLELLMPVLPIVRVENFVKGVEYAVEAEHGNRHTAIVHSQNIDNITYYAKAIDTTIFVKNAPSVAGIGVDSESVVSFSIAGPTGEGITTAKDFTRARHCVLVDGFRII

SEQ ID NO: 342 - protein, 464 aa, Artificial Sequence
  Caldanaerobius fijiensis
VVKEEQIEAIVREVLRRIDREDIKLNEDKHQLGVFDKMEDAIEAAKDAFEKFSNMTLEDRERFISEIRKATLENARVLAEMGVKETGMGKVEHKVLKHQLVAKKTPGTEDLKTQAWSGDKGLTLVEMAPFGVIGAITPSTNPSETIICNSIGMIAAGNAVVFSPHPGAKRVSNFAVDMINRAIIRAGGPENLVVSIKEPSINTTNAMIKHPDVKLLVATGGPEIVKIVLSSGKKAIGAGAGNPPVVVDETADIKKAAKDIIDGCTFDNNLPCIAEKEVIAVEKIYRDLLDEILKQGVYKLNALQISKLENLVLMDGKLNKKLVGKDAKVILDQIGINVSDDIRCIICETDEDHPFVMEELMMPILPIVKAKNIDDAIRIAVKAEKNNRHTAHIHSKNIDNITRYAKAINTTILVKNAPSYAGIGFGGEGFTTFTIAGPTGEGLTSAQTFTRMRRCVLADGLRII

SEQ ID NO: 343 - protein, 480 aa, Artificial Sequence
  Pelosinus fermentans
MSIDQALIEKITLEILTKMQTGAKAAPAGYGDGIFETVDEAVAAARKAYQELKTLSLEKREVLIKAMRDVAYENATILAQMAVDESGMGRVSDKIIKNQVAALKTPGTEDLTTQAWSGDNGLTLIEMGPYGVIGAITPTTNPTETVICNGIGMIAAGNTVFFSPHPTAKNTSMKIITLLNQAIVKAGGPNNLLTSVANPSIKAANEMMKHPGINMLVATGGPGVVKAVLSSGKKAIGAGAGNPPVIVDETADIEKAARDIVAGCSFDNNLPCIAEKEVIAIGSIADRLITYMQKYGAYLISGSNIDRLLNVIMTVQEEKIAEGCTDKPKRSYGINKDYVGKDAKYLLSKIGIDVPDSVRVVLCETPADHPFVIEELMMPVLPVVQVKDIDEAIEVAVRVEHGNRHTAAMHSKNVDHLTRFARAVETTIFVKNAPSYAGIGVGGEGFTSFTLAGPTGEGITSPRSFTRQRRCVLVDAFSIV

SEQ ID NO: 344 - protein, 463 aa, Artificial Sequence
  Blautia wexlerae
MPVSESMVQEIVQQVMAKMQIADAPAEKQHGVFKDMNDAIEAAKKSQEIVHKMSMDQREKIISCIRKKIKENAEIMARMGVEETKMGNVGDKILKHHLVADKTPGTEAITTTAWSGDRGLTLVEMGPFGVIGAITPCTNPSETVLCNTMGMLAGGNTVVFNPHPAAVKTSLYAVNLVNEASLEQGGPDNIAVSVENPTLDTSSVMMKHKDIHLLVATGGPGVVTAVLSSGKRGIGAGAGNPPALVDETADIRKAARDIVNGCTFDNNLPCIAEKEVVAVSSIMDELMHYMLTENDCYLASKEEQDKLVEVVLAGGKLNRKCVGRDARTLLSMIGVDAPANIRCIIFEGPKEHPLITTELMMPILGIVRARDFEDAVEQAVWLEHGNRHSAHIHSKNVDRITTYAKAIDTAIVVKNGPSYASLGFGSEGYTTFTIASRTGEGLTCASTFTKRRRCIMEDSLCIR

SEQ ID NO: 345 - protein, 500 aa, Artificial Sequence
  Paenibacillus sp. OSY-SE
IKLTETDIQNIIQGVLKNIEQNLPGAQAADDAATGQAKPESAPVAAAPVRSNGDYGVFDEAEAAIAAAYQAQRAYAHHFSMQDRERFIAAIRKATLEHKETLASMVLKETKLGRYEDKIAKLELTALKTPGTEDLETKAFSGDNGLTLVKDGPFGVIGAVTPVTNSVETVINNAIGMLAAGNAVVYNVHPSSKACCAYAVKMINRAVQEAGGPEHLVTMVKEPTKETLDAITQSPKVQLLVGTGGPGLVRALLRSGKKAIGAGAGNPPVIVDETANIERAAKEIIAGASFENNILCIAEKEVFVVDKVADDLLFHMLNHGAYRLDDRELEQVMSFALEANVNETAGGCSLDMKREYHTVKEWIGKDAALFLEKIGVTPEKEVKLLICEVDFDHPFVQLEQMMPVLPIVRVSDLDEAIRLAVEAEHGNRHTALMHSTNVANFAAFERAIGTTIFVKNASSLAGVGAGGEGCTTMTIAGPTGEGLTSARTFTRKKRCVLAER

SEQ ID NO: 346 - protein, 476 aa, Artificial Sequence
  Spirochaetes bacterium GWC2_52_13
VSQSIEDTVRTLVEKLVLEYSASSVGVDHIAPSQYASGIFPTMDLAVKAAYEAQRHLVGLPLEKRKEIVQAMRETAMDHAQEFAEMAVQESGRGNVADKIAKNILAAKKTPGVEDVETSAYSDEHGLSLVERAPYGVIGSITPVTNPTATIINNGISMISGGNSVVFNPHPGAKNVSCFAIEVLNAAIERVGGPRNLLVSLAQPTIESANEMMGHQKISLLVVTGGPGVVKAAMNSGKKVIAAGPGNPPCVVDETAKIQKAAKDIVDGASFDNNLVCICEKEVLVVKSVANELIGEMQKVGAYLLSDQQAKSLLDQIIEVPGMMNSEGVVKREYVGKSPSFLASLIGVTVPESTRLLICDVDAGNPLVWTEQLMPFLPIVRMENVDQCIDLAVQCEHGFRHTAIMHSLNVEKLSKMARQMNCSLFVKNGPCYAGLGNGGAGYTSFTIASPTGEGLTRARTFTRERRCTLVDYFRII

SEQ ID NO: 347 - protein, 454 aa, Artificial Sequence
  Romboutsia lituseburensis DSM
MEARDYVLQLINKARIAQKEFEKYSQEQVDEAVRAIGKSIYDNGEMLARMAVDETKMGVYEDKIVKNKGKSKAVWNKLKGVKSRGIIKYIAEEGLVEVAKPIGVVGAVTPTTNPTMTPMHNAMIALKGGNAIIICPHPRAKNTGVKTVDLMREALDKVGAPKDLIQIVNEPTVEISNLVMQLSDVCVSTGGPGMVKVAYSSGKPAFGVGAGNVQCLIDKDANLEEVVPKVIKGRIYDNGILCTCEQSAICPDEMYNEFIDRLVQSGAYYIEKEEEVKSLRKALFPDGNISKDCVGASPYEIAKMASIAIPKDTKLLVVKVEKYGTEEYFAKEKMCPVLSAYKYEKWEDAVNIANQNLEYEGKGHSAIIHSYTKENIEYAANILPVSRFGVNQIGSSGLGGSFLNGLNPTATLGCGSWGNNSISENLWFNHLINVSKIAYEVPSKKIPTDDEIWN

SEQ ID NO: 348 - protein, 485 aa, Artificial Sequence
  Clostridium sp. CAG:448
MAINWTEAQIADIVSKVIAGMGEQTLVNDKEWDATQYHGRKLIGIFETMEEAIDAASAGYAAIRAMSVAQRETLISSIRTYCRNEARIMAELGVAETHMGRVDHKTAKHILVADKTPGTEDIVAEAKTGDCGLTLTERAPFGVVGAITPSTNPSETVICNSMGMIAAGNGVVFNPHPGAIATSNYAVDLVNRAVFAAGGPKVLVASVRKPTMDTAQVMYKHPAIRLLVCTGGPGVVKAVLSSGKKAIGAGAGNPPVIVDDTADIEKAAKDIIDGCTFDNNLPCIAEKEVFVFDNVADRLIAGMLRNGCIKLTREQADELAKVVVVEKTDSKTGKVTRSVNRDCVGRDCRVILKKIGIEVGPEIRCAIAEVPFEHTFVQTELMMPILGIVRVKDIDEAIDLAVKAEHGNRHTAHMHSKNIDNLSRFAKAIETTIFVKNAPSYAGIGFGGEGHTTFTIAGPTGEGITSAKSYTRLRRCVMADHFRII

SEQ ID NO: 349 - protein, 462 aa, Artificial Sequence
  Yersinia bercovieri ATCC 43970
MNTNDLESLIRTILTEQLTPATASASNAIFASVDEAVNAAHSAFLRYQQSPMKTRSAIISALRQQLKPQLASLSERGASETGMGNKEDKFLKNKAALENTPGIEDLSTTALTGDGGMVLFEYSPFGVIGSVAPSTNPTETIINNSISMLAAGNAVYFSPHPGAKAVSLDLIAQIEAIIFNSCGIRNLVVTVQEPSFEATQQMMAHDKIALLAITGGPAIVAMGMKSGKKVIGAGAGNPPCLVDETAELAKAAQDIVSGASFDYNLPCIAEKSLIVVESVADRLLQQMQAFDALLISNPQDVDSLRKACLTPQGHANKNLVGKSPLELLKAAGLTCPAKAPRLLLVEVAGDDPLVTTEQLMPLLPVVRVKDFDAALTLALQVEGGLHHTATMHSQNVSRLNLAARLLQTSIFVKNGPSYAGIGVGGEGFTTFTIATPTGEGTTSARTFARQRRCVLTNGFSIR

SEQ ID NO: 350 - protein, 511 aa, Artificial Sequence
  Proteocatella sphenisci
VDIGQKDIELIVQQVLKNVVSQSAAAQSNSQPEVKTYRPGVPVQEFSMKSQYAPSSPYPSSSQSSAGDYGVFETMDQAVEAAYQAQKIYQAKFQLKDRERLIKSIRETGMKNVEKLARMSVDETGLGRYEDKILKNTLVLERTPGTECLKTEAISGDDGLTIIEHAPYGVIGSITPVTNPTETIINNVISMIAGGNSVVFNVHPSAKESCRFAVQMINKAIEEVGGPKNLVSMVKQPTLDTVSQLSKNDKVRLMAGTGGMPMVRSLLQSGKKVIGAGAGNPPVIVDETADIKRAAAEIFKGASFDNNVLCLAEKEVFIVESVATDFVYNMIQEGAFLLNESQLEKIMNLVLTYEETPNGREYHTSKNWVGKDAGKMLDAIGINGKSDCRLLICEVGPNHPFVLLEQLMPVLPIVKCKNLDEAIKFAMIAEHGNRHTASMFSQSINNLTRFAREVETTIFVKNAATLAGVGFGGEGHTTMTIAGPTGEGITNAVSFTRQRRCALSEGGFRII

SEQ ID NO: 351 - protein, 480 aa, Artificial Sequence
  Pelosinus propionicus DSM
MSIDQALIEKITLEILSKMQTGAKAAPTGYGSGIFETVDEAVAAARKAYQELKTLSLEKREVLIKAMRDVAYENATILAQMAVDESGMGRVSDKIIKNQVAALKTPGTEDLTTQAWSGDNGLTLIEMGPYGVIGAITPTTNPTETVICNGIGMIAAGNTVFFSPHPTAKNTSIKIITLLNDAIVKAGGPNNLLTSVANPSIKAANEMMKHPGINMLVATGGPGVVKAVLSSGKKAIGAGAGNPPVIVDETADIEKAARDIVAGCSFDNNLPCIAEKEVIAVGSIADRLITYMQKYGAYLISGSNIDRLLDVIMTVQEEKIAEGCTDKPKRSYGINKDYVGKDAKYLLSKIGIDVPDSVKVVLCETPADHPFVIEELMMPVLPVVQVKDIDEAIEVAVRVEHGNRHTAAMHSKNVDHLTRFARAVETTIFVKNAPSYAGIGVGGEGFTSFTLAGPTGEGITSPRSFTRQRRCVLVDAFSIV

SEQ ID NO: 352 - protein, 457 aa, Artificial Sequence
  Clostridium sp. KLE
MVQDIVKEVVARMQLSGTAQSAQHGVFNDMNQAIEAAKEAEKTVRRMTMDQREQIVSNIRKKTHEAAEILARMGVEETGMGNVGDKILKHHLLADKTPGTEDITTTAWSGDRGLTLIEMGPFGVIGAITPCTNPSETVLCNSIGMIAAGNTVVFNPHPQAIRTSIFAINLVNEASLEAGGPDNVACTVFKPTLETSNIMMKHKDIPLIAATGGPGVVTAVLSSGKRGIGAGAGNPPALVDETADIRKAAADIVNGCTFDNNLPCIAEKEIVAVDSIADELMNYMISEQGCYLISKEEQDKLTATVLTPKGLNRKCVGRDARTLLSMIGIQAPENIRCIVFEGEKEHPLISEELMMPILGLVRAKDFDDAVEKAVWLEHGNRHSAHIHSKNIDNITKYARAIDTAILVKNAPSYAALGFGGEGFCTFTIASRTGEGLTSTSTFTKRRRCVMSDSLCIR

SEQ ID NO: 353 - protein, 527 aa, Artificial Sequence
  Caldalkalibacillus thermarum TA2.A1
MNMTEKDIEKIVQSVLHNVESALGKSASASPSVSAVSVASGEGIKPVQFKQVPVFQQETVKSPNRNRNLGGAEEKWGVFNHMEDAIEASYRAQMEFVKHFQLKDREKIITAIREAVLREKEVLARKVYEETKIGRYEDKVAKHELAALKTPGTEDLKTEAFSGDNGLTIVERAPYGLIGAVTPVTNPTETIINNAIGMLAAGNAVVFNVHPSSKRSCAYAVQLINKAITEAGGPHHLVTMVKEPTLDTLQTLIDSPKVKLLVGTGGPGLVQTLLKSGKKAIGAGAGNPPVIVDDTADLEHAARSIIEGAAFDNNLLCIAEKEVFVLESVADDLIFHMLNHGAYMLGQHEVEQVMAFALEEQGNEQNRGCGFNPQRHYQVSKDWIGQDARLFLEHIGVQPPTEVKLLICDVEFDHPFVQLEQMMPVLPIVRVKTLDEAIEKAVMAEHGNRHTAIMHSKNVDHLTKFARAIQTTLFVKNASSLAGVGYGGEGHTTMTIAGPTGEGVTSAKTFTRERRCVLAEGGFRIIG

SEQ ID NO: 354 - protein, 476 aa, Artificial Sequence
  Caldalkalibacillus thermarum TA2.A1
VPVFQQETVKSPNRNRNLGGAEEKWGVFNHMEDAIEASYRAQMEFVKHFQLKDREKIITAIREAVLREKEVLARKVYEETKIGRYEDKVAKHELAALKTPGTEDLKTEAFSGDNGLTIVERAPYGLIGAVTPVTNPTETIINNAIGMLAAGNAVVFNVHPSSKRSCAYAVQLINKAITEAGGPHHLVTMVKEPTLDTLQTLIDSPKVKLLVGTGGPGLVQTLLKSGKKAIGAGAGNPPVIVDDTADLEHAARSIIEGAAFDNNLLCIAEKEVFVLESVADDLIFHMLNHGAYMLGQHEVEQVMAFALEEQGNEQNRGCGFNPQRHYQVSKDWIGQDARLFLEHIGVQPPTEVKLLICDVEFDHPFVQLEQMMPVLPIVRVKTLDEAIEKAVMAEHGNRHTAIMHSKNVDHLTKFARAIQTTLFVKNASSLAGVGYGGEGHTTMTIAGPTGEGVTSAKTFTRERRCVLAEGGFRIIG

SEQ ID NO: 355 - protein, 462 aa, Artificial Sequence
  Blautia sp. CAG:257
MPISENMVQEIVQEVMAKMQIAEAPAGKHGIFKDMNDAIEAAKKAELIVKRMSMDQREKIITCIRKKIKENAEVLARMGVEETGMGNVGDKILKHHLVADKTPGTEDITTTAWSGDRGLTLIEMGPFGVIGAITPCTNPSETVLCNTMGMLAGGNTVVFNPHPAAIKTSIYAINLLNEASLESGGPDNIAVTVEKPTLETSDIMMKHKDIHLIAATGGPGVVTAVLSSGKRGIGAGAGNPPALVDETADIRKAAQDIVNGCTFDNNLPCIAEKEIVAVSSIADELMHYLITENDCYLASKEEQDKLTEVVLAGGKLNRKCVGRDARTLLSMIGVDAPANIRCIVFEGPKEHPLIAEELMMPILGMVRARDFDDAVEQAVWLEHGNRHSAHIHSKNVDNITKYARAIDTAILVKNGPSYSALGFGGEGFCTFTIASRTGEGLTSASTFTKRRRCVMSDSLCIR

SEQ ID NO: 356 - protein, 469 aa, Artificial Sequence
  Listeria marthii FSL
MESLELEQLVKKVLLEKLAEQKEAPAKPITQGAKSGIFDTVDEAVQAAVIAQNCYKEKSLEERRNVVKAIRETLYPEIETIATKAVAETGMGNVADKILKNTLAIEKTPGVEDLYTEVATGDNGMTLYELSPYGVIGAVAPSTNPTETLICNTIGMLAAGNAVFYSPHPGAKNISLWLIEKLNTIVRESCGIDNLVVTVEKPSIQAAQEMMNHPKVPLLVITGGPGVVLQAMQSGKKVIGAGAGNPPSIVDETANIEKAAADIVDGASFDHNILCIAEKSIVAVESIADFLLFQMEKNGALHVTNPSDIQKLEKVAVTDKGVTNKKLVGKSAAEILKEAGITCDFTPRLIIVETTKTHPFATVELLMPIVPLVRVPDFDEALEVAIELEQGLHHTATMHSQNISRLNKAARDMQTSIFVKNGPSFAGLGFRGEGSTTFTIATPTGEGTTTARHFARRRRCVLTDGFSIR

SEQ ID NO: 357 - protein, 473 aa, Artificial Sequence
  Clostridium methoxybenzovorans
MEIGAKEIELIVREVLAGIESRGIKPSYTPSRSEDGVFERVEDAIEAAYAAQREWVEHYRVEDRRRIIEAIRVTAKSHAESLAKMVWEETGMGRFEDKIQKHMAVIEKTPGVECLTTEAISGDGGLMIEEYAPFGVIGAITPSTNPTETIINNTISMIAGGNSVVFNVHPGAKRCCAHCLKILHQAIVENGGPASLITMQKEPDMEAVSKLTSDPRIRLMVGTGGMPMVNALLRSGKKTIGAGAGNPPVIVDDTADVSLAAREIYRGASFDNNILCLAEKEVFVMERAADELVNKLIKEGAYLLSSMELSEILKFAMVEKNGSYEVNKKWVGKDAGQFLEAIGVSGHKDVRLLICETDRSHPFVMVEQLMPILPIVRLRTFEECVESALAAESGNRHTASMFSRNVENMTKFGKIIETTIFTKNGSTLKGVGIGGEGHTTMTIAGPTGEGLTCARSFTRRRRCMLAEGGLRII

SEQ ID NO: 358 - protein, 477 aa, Artificial Sequence
  Bacillus sp. m3-13
VQIKESDIKEMVAQVLAQLGDESKQPSPASEQGSNEVPLGNGVFTTVDQATEAATEAWDKLRATSLETRKNMIEKMREVSREHAKALAELAVKETGLGRVEDKVAKNLLAADKTPGVEDIVATTYSGDGGLTLVEYSPVGVYGAITPSTNPAATIINNSISLVAAGNAVVFNPHPSAKQVSIKTMQLLNEAIVAAGGPANTLTSVASPNIETSNEVMKHPKVRALVVTGGGIVVQAAMSAGKKVIAAGPGNPPVVVDETAIISKAAKDIVTGASFDNNVLCTAEKEVFVVEKVANTLKSEMTKNGAVELKGYQLEKLLGKILVKKGEKYYPNRDFIGKDASVLLEAAGIRSDSNVKLIIAETKEDHPLVHTEMLMPILPIVRVSDVDKAISLAVKAEKGNRHTAIMHSQNVTNLTKMAKEIQATIFVKNGPSVAGLGYQSEGFTTLTIAGPTGEGLTSAKTFTRQRRCVLVDGFRII

SEQ ID NO: 359 - protein, 472 aa, Artificial Sequence
  bacterium CG2_30_54_10
MSVSKDEINVIVQEVLKAIETSGGLPSAASSVGRISQKGVFENLDDAIKAAGQAQKKLVELPLKTRGEIIANMRRRAAENVEEISRLGHEETGYGRIADKIQKNMLAITKTPGIEDLQPVAYSGDHGLTIVEQAPYGVIGAITPSTNPSETVICNSIGMIAAGNAVVFGPHPSAAQVCLLAISVLNDAVVEAGGPENLMVSVSKPSIQTAQALMAHPDIRLLVVTGGPAVVAAAAKSGKKFIAAGPGNPPAVVDETADLKKAARDIISGATLDNNILCIAEKEIIVVESVADELKRHLCNSGAYEASAREILQLEKLVIDPRTHGPNRSFIGKNASVILDAIGVKVSDEVRMVLCEVGPDHPFVVEEMMMPVVPLVRVRDVHTAVDFAVKIEHGCRHTAIMHSKNLDNLHLMATRCNCSIFVKNGPSYAGLGLGGEGFTTFTIASPTGEGLTSARTFTRQRRCVLVDYFRIV

SEQ ID NO: 360 - protein, 475 aa, Artificial Sequence
  Candidatus Izimaplasma sp.
MSTNDLIKQLTEEMERKYGNDVVTKPNTPTNSYNTGYVGIFENVEDAILAAKESQKQLMELSMKKRKEIIEAMRKASLENAEKLAIMAHEETGFGRVADKIIKNVLAAEKTPGTEDLSSSTFTGDDGMTLVELAPYGVIGSITPSTNPSSTIINNSISMVAAGNGVVYNPHPSAKKVTSETISILNKAISSVGGPRELLTAPLTPTMDTSKVIMTHKDVRILVVTGGEAVVGVAMKSGKKVIAAGPGNPPVIVDETANIKKAANDVFRGASFDNNILCIAEKEAFVINSVINEFKQEMVSNGAYELKRHEIDLVTEEVFTKNKNGDTVVNRKHVGKSAVEILKACNIMVHQDIRLITAEVSENHPFITVEMLMPVLGIVRVYSIDEAIEKAVIAEDGCLHTAIMHSESVSNLTKAARALNTSIFVKNAPSFAGLGIEGEGFTTLTIATPTGEGLTSARSFTRIRRCTLSGGFRIV

SEQ ID NO: 361 - protein, 462 aa, Artificial Sequence
  Firmicutes bacterium CAG:41
VPINENMVQDIVQEVLAKMQIQEAPTGKHGVFKDMNEAIEAAKKAQQTVKKMSMDQREKILSIIRKKICENAETMARMGVEETGMGNVGDKILKHRLVAEKTPGTEDITTTAWSGDRGLTLVEMGPFGVIGAITPCTNPSETVLCNTMGMLAGGNTVVFNPHPAAIKTSIFAINLLNEASLEGGGPDNIACTVENPTLETSNIMMKHKDIPLIAATGGPGVVTAVLSSGKRGIGAGAGNPPALVDETADIRKAAQDIVNGCVFDNNLPCIAEKEIVAVSSVVDELMHYMVTEQGCYLASKEEQDALTAVVLAGGRLNRKCVGRDARTLLSMIGVDAPANIRCITFEGPKEHPLIAEELMMPILGVVRAKDFEDAVEQAVWLEHGNRHSAHIHSKNIDNITTYAKAIDTAILVKNAPSYAALGFGGEGYCTFTIASRTGEGLTSASTFTKRRRCVMSDSLCIR

SEQ ID NO: 362 - protein, 467 aa, Artificial Sequence
  Thermoanaerobacterium xylanolyticum LX-11
MKVKEEDIEAIVKKVLSEFNLEKTTSKYGDVGIFQDMNDAISAAKDAQKKLRNMPMESREKIIQNIRKKIMENKKILAEMGVRETGMGRVEHKIVKHELVALKTPGTEDITTTAWSGDKGLTLVEMGPFGVIGAITPSTNPSETVLCNSIGMIAAGNSVVFNPHPGAVNVSNYAVKLVNEAAMEAGGPENLVVSVEKPTLETGNVMFKSSDVSLLVATGGPGVVTAVLSSGKRAIGAGAGNPPVVVDETADIKKAAKDIIDGATFDNNLPCIAEKEVVSVDKITDELIYYMQKNGCYKIEGREIEKLIELVLDHEGGKTTLNRKWVGKDAHLILKAIGIDADESVRCIIFEAEKDNPLVVEELMMPILGIVRAKNVDEAIMIATELEHGNRHSAHMHSKNIDNLTKFGKIIDTAIFVKNAPSYAALGYGGEGYCTFTIASRTGEGLTSARTFTKSRRCVLADGLSIR

SEQ ID NO: 363 - protein, 441 aa, Artificial Sequence
  Listeria monocytogenes
MTKGAKSGVFDTVDEAVQAAVIAQNSYKEKSLEERRNVVKAIREALYPEIESIAARAVAETGMGNVADKILKNTLAIEKTPGVEDLYTEVATGDNGMTLYELSPYGVIGAVAPSTNPTETLICNTIGMLAAGNAVFYSPHPGAKNISLWLIEKLNTIVRESCGVDNLVVTVEKPSIQAAQEMMNHPKVPLLVITGGPGVVLQAMQSGKKVIGAGAGNPPSIVDETANIEKAAADIVDGASFDHNILCIAEKSVVAVDSIADFLMFQMEKNGALHVTNPSDIQKLEKVAVTDKGVTNKKLVGKSASEILKEAGIACDFSPRLIIVETEKTHPFATVELLMPIVPVVRVPNFEEALEVAIELEQGLHHTATMHSQNISRLNKAARDMQTSIFVKNGPSFAGLGFRGEGSTTFTIATPTGEGTTTARHFARRRRCVLTDGFSIR

SEQ ID NO: 364 - protein, 481 aa, Artificial Sequence
  Clostridium lavalense
MEIETRDIERIVRQVMAVMEQQGTIAGGAYPPAPGTPAPRGDNGVFERVEDAIDAAYAAGREWAFHYKVEDRRRVIEAIRVMARENARTLAQMVRDETGMGRMEDKVEKHLAVADKTPGVECLTTDAISGDGGLMIEEYAPFGVIGAITPSTNPTETVIHNTISMIAGGNSVVFNVHPGAKKCCAFCLQLLHKTIVENGGPANLITMQREPTMDAVNKMTSSPKIRLMVGTGGMGMVNALLRSGKKTIGAGAGNPPVIVDDTADVKLAARELYWGASFDNNLFCFAEKEVFVMEASADGLIRGLVEQGAYLLTPAETEAIVKLALIQKDGKYEVNKKWVGKDAGLFLKAIGVSGHENTRLLICDVPKCHPYVMVEQLMPVLPIVRCRTFDECIQCSVEAEQGNRHTSSIFSTNVYNMTKFGKEIETTIYVKNGATLRGLGIGGEGHTTMTIAGPTGEGLTCARSFTRRRRCMLAEGGLRII

SEQ ID NO: 365 - protein, 474 aa, Artificial Sequence
  Acetanaerobacterium elongatum
MEFAVNEISMIVEQVLKNLDLSKVSAGNAPASPKGDYGVFENVEDAIEAAYQAQKIYLDKFQVKDRQRIIAAIRKVCRENAETLARMVREESKMGRYEDKIQKHLAVIDNTPGPECLTTDAISGDSGLMLEEYAPFGLIGAITPVTNPTETIINNTISMISGGNSVVFNVHPSAKNVCAYCLRLINKTIIDNGGPANLITMAKEPTMDTVKAISSSPKVRLMVGTGGMPMVNALLRSGKKVIGAGAGNPPVIVDNTADIKKAAKDIYYGASFDNNLLCLAEKEVFVLDEVANQFIYNMVEEGAYLLNGVQLEKILNLVFKFDGKYDVNKKWVGQDAGKMLDAIGVEGKSDTRLLICEVPHDHPFVMVEQLMPVLPIVRCRNLDEAIEYAYIAESGNRHTASMFSKNVDNMTRFARKIETTIFVKNGPTLNGVGIGGEGYATMTIAGPTGEGLTCAKSFTRRRRCMLSDGGLRVI

SEQ ID NO: 366 - protein, 464 aa, Artificial Sequence
  Alkaliphilus peptidifermentans DSM
MVEELKIEEIIRRVMKEISSKNETGEEGAYGIFQDMNDAVDAAYIAQKELIGFNLETRGKFIEAMRQAARQNVELLSKMAHEETDMGRYEDKILKNRLAIEKTPGIEDLGSEVFTGDDGLTLIELSPYGVIGSISPVTNPSETIICNAIGMIAAGNAVAFSPHPSAKKTSLKTIEILNKGIIEAGGPKNLIVAVENPSIEQAEAMMKHKKINMLVATGGPGVVKSVLSSGKKAIGAGAGNPPAVVDETADIEKAARDIIAGCSFDNNLPCVAEKEVIVVDSVADYLIFNMKKNGAYELKEKDLIEQLEKLVVNEKGYPVKEFVGKNADYILSKMGIKCDDSIRAIIVEVPKSHPFVVGELMMPVLPIVRVNDVEEAIKLAVEVEHGFKHTAIMHSKNIDRLSKFAKEIQTTIFVKNGPSFAGIGVGGEGYATFTIAGPTGEGLTSAKSFARRRRCTLVGGFSIK

SEQ ID NO: 367 - protein, 481 aa, Artificial Sequence
  Clostridium populeti
MDISSQEIEAIVRKVIAGINPATNVTPDIPAIKSPKYTGDNGVFERVEEAVEAAWKAQRDWVTNYKVEDRHRIVEAIRRCGRDHVEEWSHLIVEETQMGRYEDKVEKHLAVINKTPGPECLTTEAISGDAGLMIEEYAPFGVIGSITPTTNPTETMIHNTISMISGGNSIVFNVHPRAKRVCAECLQALHKAIVDAGGPANLITMLREPTMDTVDMLTSNPKVRLMTGTGGMGMVNALLRSGKKCIGAGAGNPPVIVDETADVELAARKIYEGASFDNNILCFAEKEVFVVSPNYEGFIHNIQKQGAYLLNNSQVEALVKICLEPNKNQSGYEVNKKWVGKNAALILAQIGVQVEDSCRLAVCEVPADHPFVLVEQMMPVLPIVRCSTFEEAMEKAVIAEQGNRHTSSIFSKDVDHMTRFARLIETTIYVKNSCTKAGVGIGGEGHCTMTIAGPTGEGITNAKSFCRRRRCMLAEGGLRII

SEQ ID NO: 368 - protein, 450 aa, Artificial Sequence
  Candidatus Bacteroides periocalifornicus
MTIAEMVAKARVAQAEFEKNFDQAKTDAVVREIGKTVFDNAEMLAKMAVEETRMGVYEDKVAKNKGKARGVWYDLKGKKSMGVLSVDPETDLITMLKPVGVVAAITPTTNPIVTPMSKSMFAVKGKNAIIVAPHPRSKKCTAKTIELINKAIAKFGVPKDLIQVIEEPSIPLTQELMASCDVVLATGGMGMVKAAYSSGKPSYGVGAGNVQVIIDRGVDYDKAAATIIKGRIFDNGIICSGEQSFIYPKDEKAKVFDAFKKNGAYIVADADHDKVVNALFEDGHIAGDVVGQSVQFVAKKAGLNVPADARVIVVEAKGVGAQDPICKEKMCPVLAAFGYDKFEEAIQIAKTNLLNEGNGHSAGIHSNNEEHIRMVGEGLTVSRVVVNAPVSTTAGGAIGSGLAVTNTLGCGTWGNNTLSENLTYKHLLNTTRVARISPKVHQPTDEELWG

SEQ ID NO: 369 - protein, 480 aa, Artificial Sequence
  Anaerocolumna aminovalerica
MEFGTKEISMIVEQVLKNLEENNLISTKKTSNSGLYSDKGDYGVFERVEDAIDAAYEAQKIYLDNFKIKDRQRLIAAIRKVSIENAETLARMIVEESKMGRVEDKVKKHLAVIENTPGPECLTTDAITGDGGLMIEEYAPFGLIGAITPVTNPTETIINNTISMISGGNGIVFNVHPSAKKVCAYCLQFINKTIIENGGPANLITMVKEPTMETCNIITQSPKVRLMVGTGGMGMVNSLLRSGKKTIGAGAGNPPVIVDETADIKKAAKDIYYGASFDNNLLCLAEKEVFVLEEVANDFIYNMVDEGAFLLNGAQLEAITNLVLKYENGKYDINKKWVGQDAGKMLEAIGITGKSDTRLLICDVPYDNPFVLLEQLMPVLPIVRCKNLNQAIDYAMIAESGNRHTASMFSKNVDNMTRFARKIETTIFVKNGCTLEGVGIGGEGYTTMTIAGPTGEGITCAKSFTRRRRCMLADGGLRII

SEQ ID NO: 370 - protein, 405 aa, Artificial Sequence
  Candida tropicalis
MAMFTTTAKVIQPKIRGFICTTTHPIGCEKRVQEEIAYARAHPPTSPGPKRVLVIGCSTGYGLSTRITAAFGYQAATLGVFLAGPPTKGRPAAAGWYNTVAFEKAALEAGLYARSLNGDAFDSTTKARTVEAIKRDLGTVDLVVYSIAAPKRTDPATGVLHKACLKPIGATYTNRTVNTDKAEVTDVSIEPASPEEIADTVKVMGGEDWELWIQALSEAGVLAEGAKTVAYSYIGPEMTWPVYWSGTIGEAKKDVEKAAKRITQQYGCPAYPVVAKALVTQASSAIPVVPLYICLLYRVMKEKGTHEGCIEQMVRLLTTKLYPENGAPIVDEAGRVRVDDWEMAEDVQQAVKDLWSQVSTANLKDISDFAGYQTEFLRLFGFGIDGVDYDQPVDVEADLPSAAQQ

What is claimed is:

1. An engineered carboxylic acid reductase (CAR) enzyme comprising at least one alteration of an amino acid of SEQ ID NOS:152, 153 or 254.

2. The engineered CAR of claim 1, wherein the engineered CAR enzyme is capable of:
(a) forming 6-aminocaproate semialdehyde from a 6-aminocaproic acid substrate;
(b) forming 6-aminocaproate semialdehyde from a 6-aminocaproic acid substrate at a greater rate as compared to the wild type CAR;
(c) having a higher affinity for a 6-aminocaproic acid substrate as compared to the wild type CAR, or
(d) any combination of (a), (b) and (c).

3. The engineered CAR of any one of claims 1-2, wherein the engineered CAR comprises one or more amino acid alterations at one or more residue positions selected from the group consisting of P141, L245, I247, W270, S274, K275, N276, F278, G279, N279insert, A282, A283, S299, I300, N335, S336, M389, G391, G414, G421, M422, F425, G636, D809, I810, L811, A812 and F929 or a combination thereof of SEQ ID NO:152, 153 or 254.

4. The engineered CAR of any one of claims 1-3, wherein the engineered CAR comprises one or more amino acid alterations at one or more residue positions selected from the group consisting of P141, L245, I247, W270, S274, K275, N276, F278, G279, N279insert, A282, A283, S299, I300, N335, S336, M389, G391, G414, G421, M422, F425, G636, D809, I810, L811, A812 and F929 or a combination thereof of SEQ ID NO:152, 153 or SEQ ID NO:254 that is a conservative amino acid substitution.

5. The engineered CAR of any one of claims 1-3, wherein the engineered CAR comprises one or more amino acid alterations at one or more residue positions selected from the group consisting of P141, L245, I247, W270, S274, K275, N276, F278, G279, N279insert, A282, A283, S299, I300, N335, S336, M389, G391, G414, G421, M422, F425, G636, D809, I810, L811, A812 and F929 or a combination thereof of SEQ ID NO:152, 153 or 254 that is a non-conservative amino acid substitution.

6. The engineered CAR of any one of claim 1-5, wherein the at least one amino acid alteration of the engineered protein is an alteration selected from Table 9 and combinations thereof of SEQ ID NO:152, 153 or 254.

7. The engineered CAR of any one of claims 1-6, wherein the amino acid alteration comprises at least two, three, four, five, six, seven, eight, or more of an amino acid sequence of SEQ ID NO:152, 153 or 254.

8. The engineered CAR of any one of claims 1-7, wherein the amino acid positions comprises at least two, three, four, five, six, seven, eight, or more amino acid positions of SEQ ID NO:152, 153 or 254.

9. The engineered CAR of any one of claims 1-8, wherein the engineered CAR comprises an activity that is at least 20% higher than the activity of the CAR of SEQ ID NO:152, 153 or 254.

10. The engineered CAR of any one of claims 1-9, wherein the engineered CAR comprises one or more amino acid alterations selected from the group consisting of: N335E; N335D; S274D; S274E; K275D; K275E; S299D; S299E; M389D; M389E; G414D; G414E; G421D; G421E; M422D; M422E; F425D; F425E; N335D and A282P; N335D and A282V; N335D and A283C; N335D, A283C and F929L; N335D, A283C and G636D; N335D and A283G; N335D and F278A; N335D and F278C; N335D and F278S; N335D and F278V; N335D and G279V; N335D and I247M; N335D and I247Q; N335D and 1247T; N335D and 1247V; N335D and I300C; N335D and I300G; N335D and I300M; N335D and I300M; N335D and I300Y; N335D and K275A; N335D and K275D; N335D and K275D; N335D and K275E; N335D and K275M; N335D and K275N; N335D and K275S; N335D and K275T; N335D and K275V; N335D and K275W; N335D and L245C; N335D and L245G; N335D and L245S; N335D and L245T; N335D and L245V; N335D and M389I; N335D and M389W; N335D and M422D; N335D and N276S; N335D and N279INSERT; N335D and P141G; N335D and S299D; N335D and S299E; N335D and S391G; N335D and W270M; K275D, N276S, F278S, A283C and N335D; L245V, K275D, N276S, F278S, A283C and N335D; I247M, K275D, N276S, F278A, A283C and N335D; L245V, K275T, N276S, F278S, A283C and N335D; I247M, K275T, N276S, F278S, A283C and N335D; K275D, N276S, F278S, A283C, I300G and N335D; L245T, K275D, N276S, F278A, A283C and N335D; K275N, F278S, A283C, S299D and N335D; I247M, K275N, N276S, F278S, A283C and N335D; K275N, F278S, A283C, I300G and N335D; K275N, N276S, F278S, A283C, I300G and N335D; I247M, K275T, F278S, A283C and N335D; L245V, K275D, N276S, F278A, A283C and N335D; K275N, F278S, A283C, I300G and N335D; K275N, F278A, A283C, S299D and N335D; K275N, N276S, F278A, A283C and N335D; L245V, K275N, N276S, F278S, A283C, I300G and N335D; L245T, K275N, N276S, F278S, A283C, I300G and N335D; K275N, F278A, S299D and N335D; I247M, K275N, F278A, A283C, I300Y and N335D; I247M, K275N, F278A, A283C and N335D; K275D, N276S, F278A and N335D; K275T, F278A, A283C, S299D and N335D; F278A, A282P and N335D; F278A, A283C and N335D; K275N, S299D and N335D; L245T, S299D and N335D; K275D, S299D and N335D; K275N, F278S and N335D; S299D, M389W and N335D; G279V, S299D and N335D; F278A, S283C and N335D; K275D, N276S and N335D; G279V, S299E and N335D; I247M, S299D and N335D; P141G, A282P and N335D; L245T, A282P and N335D; F278S, A283C and N335D; K275D, S284I, S299D and N335D; I247M, I282P and N335D; I247V, K275D, N276S, F278S, A283C, I300G and N335D; I247V, K275D, N276S, F278S, A283C, I300G and N335D; K275D, S274A, N276S, F278S, A283C, I300G and N335D; K275D, S274P, N276S, F278S, A283C, I300G and N335D; K275D, N276S, F278S, A282F, A283C, I300G and N335D; K275D, N276S, F278S, A282P, A283C, I300G and N335D; K275D, N276S, F278S, A283C, S299I, I300G and N335D; K275D, N276S, F278S, A283C, I300G, N335D and M389C; K275D, N276S, F278S, A283C, I300G, N335D and M389Y; and K275D, N276S, F278S, A283C, I300G, N335D and M389S.

11. The engineered CAR of any one of claims 1-10, wherein the engineered CAR comprises at least one alteration of an amino acid of SEQ ID NO: 153, and wherein the engineered CAR comprises one or more amino acid alterations selected from the group consisting of: K275D, N276S, F278S, A283C, I300G and N335D; I247V, K275D, N276S, F278S, A283C, I300G and N335D; I247V, K275D, N276S, F278S, A283C, I300G and N335D; K275D, S274A, N276S, F278S, A283C, I300G and N335D; K275D, S274P, N276S, F278S, A283C, I300G and N335D; K275D, N276S, F278S, A282F, A283C, I300G and N335D; K275D, N276S, F278S, A282P, A283C, I300G and N335D; K275D, N276S, F278S, A283C, S299I, I300G and N335D; K275D, N276S, F278S, A283C, I300G, N335D and M389C; K275D, N276S, F278S, A283C, I300G, N335D and M389Y; and K275D, N276S, F278S, A283C, I300G, N335D and M389S.

12. A nucleic acid encoding the engineered CAR of any one of claims 1-11.

13. The nucleic acid of claim 12, wherein the nucleic acid sequence encoding the engineered CAR is operatively linked to a promoter.

14. A vector comprising the nucleic acid of claim 13.

15. A non-naturally occurring microbial organism comprising an exogenous nucleic acid encoding:
(a) an engineered CAR selected from any one of claims 1-11;
(b) a CAR comprising an amino acid sequence having at least 50% sequence identity to at least 25, 50, 75, 100, 150, 200, 250, 300, or more contiguous amino acids of any of SEQ ID NOS:150-165, 168-171, 173-178, 180, 183-185, 187-188, 190-193, 195, 198-200, 202-216, 218-219, 221-230, 232-238, 241-244, 246-249, 251-252 and 255-264; or
(c) a hexamethylenediamine (HMD) transaminase (TA2) enzyme having at least 50% sequence identity to at least 25, 50, 75, 100, 150, 200, 250, 300, or more contiguous amino acids of any of SEQ ID NOS:265 and 267-296.

15. The non-naturally occurring microbial organism of claim 15, further comprising an exogenous nucleic acid encoding:
(a) an engineered transaminase (TA) enzyme comprising at least one alteration of an amino acid of SEQ ID NOS:1, 13 or 31;
(b) an engineered transaminase (TA) enzyme comprising one or more amino acid alterations at one or more positions selected from residues V114, S136, T148, P153, I203, I204, P206, V207, V111, T216, A237, T264, M265, L386, G19, C22, D70, R94, D99, T109, E112, A113, F137, G144, I149, K150, Y154, S178, L186, Q208, L234, T242, A315, K318, R338, G336, L386, V390, A406, S416, A421, G17, M21, A50, A76, Y77, Q78, 179, G84, F107, T108, K119, G139, M142, A152, P153, E205, G209, G211, D238, M285, A290, G291, G292, L293, Y297, M353, S387, S388, and G392 or a combination thereof of SEQ ID NO:1;
(c) an engineered transaminase (TA) enzyme comprising at least one amino acid alteration of the engineered protein selected from an alteration set forth in Table 7 and combinations thereof of SEQ ID NO:1, or
(d) a transaminase comprising an amino acid sequence having at least 50% sequence identity to at least 25 or more contiguous amino acids of any of SEQ ID NO: 1, 3, 4, 5, 9, 12, 13, 26, 27, 30, 31, 38, 50, 52, 64, 74, 78, 79, 81, 91, 106, 108, and 116.

17. The engineered TA of claim 16, wherein the one or more amino acid alterations at one or more residue positions or a combination thereof of SEQ ID NO:1 is selected from a conservative or a non-conservative amino acid alteration.

18. The non-naturally occurring microbial organism of any one of claims 15-17, wherein the exogenous nucleic acid is heterologous.

19. The non-naturally occurring microbial organism of any one of claims 15-17, wherein the exogenous nucleic acid is homologous.

20. The non-naturally occurring microbial organism of any one of claims 15-19, comprising a CAR having an amino acid sequence selected from the group consisting of SEQ ID NOS:150-165, 168-171, 173-178, 180, 183-185, 187-188, 190-193, 195, 198-200, 202-216, 218-219, 221-230, 232-238, 241-244, 246-249, 251-252 and 255-264.

21. The non-naturally occurring microbial organism of any one of claims 15-19, comprising a CAR having an amino acid sequence selected from the group consisting of CAR variants 1-115 set forth in Table 9.

22. The non-naturally occurring microbial organism of any one of claims 15-21, comprising a HMD transaminase (TA2) having an amino acid sequence selected from the group consisting of SEQ ID NOS:265, and 267-296.

23. The non-naturally occurring microbial organism of any one of claims 16-22, comprising an engineered transaminase (TA) having an amino acid sequence selected from the group consisting of TA variants 1-233 set forth in Table 7.

24. The non-naturally occurring microbial organism of any one of claims 15-23, further comprising at least one exogenous nucleic acid encoding an aldehyde dehydrogenase (ALD) enzyme that reacts with adipyl-CoA to form adipate-semialdehyde.

25. The non-naturally occurring microbial organism of claim 24, comprising an ALD enzyme having an amino acid sequence selected from the group consisting of SEQ ID NOS:141-143 and 297-370.

26. The non-naturally occurring microbial organism of any one of claims 24-25, wherein the ALD enzyme has greater catalytic efficiency for adipyl-CoA substrate as compared to succinyl-CoA, acetyl-CoA, or both succinyl-CoA and acetyl-CoA substrates, and/or the aldehyde dehydrogenase has higher turnover number for adipyl-CoA substrate as compared to succinyl-CoA, acetyl-CoA, or both succinyl-CoA and acetyl-CoA substrates.

27. The non-naturally occurring microbial organism of any one of claims 25-26, comprising a hexamethylenediamine (HMD) pathway having a HMD pathway enzyme expressed in sufficient amounts to produce HMD, wherein said HMD pathway comprises (1) 3-oxoadipyl-CoA thiolase, (2) hydroxyadipyl-CoA dehydrogenase (HBD), (3) crotonase, (4) trans-enoylCoA reductase (TER), (5) 6ACA-aldehyde dehydrogenase (6ACA-ALD), (6) 6ACA-transaminase (TA), (7) carboxylic acid reductase (CAR), and (8) HMD-transaminase (TA2).

28. The non-naturally occurring microbial organism of claim 27, further comprising an exogenous nucleic acid encoding a phosphopantetheinyl transferase HMD pathway enzyme.

29. The non-naturally occurring microbial organism of any one of claims 27-28, wherein the microbial organism comprises one, two, three, four, five, six, seven, eight or nine exogenous nucleic acids each encoding a HMD pathway enzyme.

30. The non-naturally occurring microbial organism of any one of claims 27-28, wherein the microbial organism comprises exogenous nucleic acids encoding each of the enzymes of the HMD pathway.

31. The non-naturally occurring microbial organism of any one of claims 27-30, wherein the at least one exogenous nucleic acid is a heterologous nucleic acid.

32. The non-naturally occurring microbial organism of any one of claims 27-31, wherein the non-naturally occurring microbial organism is in a substantially anaerobic culture medium.

33. The non-naturally occurring microbial organism of any one of claims 27-32, wherein the microbial organism is a species of bacteria, yeast, or fungus.

34. The non-naturally occurring microbial organism of any one of claims 27-33, wherein the non-naturally occurring microbial organism is capable of producing at least 10% more 6-aminocaproate semialdehyde, HMD or both compared to a control microbial organism that does not comprise the exogenous nucleic acid of any one of claims 15-26.

35. The non-naturally occurring microbial organism of any one of claims 27-34, wherein the non-naturally occurring microbial organism converts more:
(a) adipate semialdehyde to 6-aminocaproic acid;
(b) 6-aminocaproic acid to 6-aminocaproate semialdehyde, and/or
(c) 6-aminocaproate semialdehyde to HMD,
compared to a control microbial organism substantially identical to the non-naturally occurring microbial organism, with the exception that the control microbial organism does not comprise the exogenous nucleic acid of any one of claims 15-23.

36. A non-naturally occurring microbial organism comprising an exogenous nucleic acid encoding:
(a) an engineered CAR selected from any one of claims 1-11, or
(b) a CAR comprising an amino acid sequence having at least 50% sequence identity to at least 25 or more contiguous amino acids of any of SEQ ID NO: 150-165, 168-171, 173-178, 180, 183-185, 187-188, 190-193, 195, 198-200, 202-216, 218-219, 221-230, 232-238, 241-244, 246-249, 251-252 and 255-264.

37. The non-naturally occurring microbial organism of claim 36, further comprising an exogenous nucleic acid encoding:
(a) an engineered transaminase (TA) enzyme comprising at least one alteration of an amino acid of SEQ ID NOS:1, 13 or 31;
(b) an engineered transaminase (TA) enzyme comprising one or more amino acid alterations at one or more positions selected from residues V114, S136, T148, P153, I203, I204, P206, V207, V111, T216, A237, T264, M265, L386, G19, C22, D70, R94, D99, T109, E112, A113, F137, G144, I149, K150, Y154, S178, L186, Q208, L234, T242, A315, K318, R338, G336, L386, V390, A406, S416, A421, G17, M21, A50, A76, Y77, Q78, 179, G84, F107, T108, K119, G139, M142, A152, P153, E205, G209, G211, D238, M285, A290, G291, G292, L293, Y297, M353, S387, S388, and G392 or a combination thereof of SEQ ID NO:1;
(c) an engineered transaminase (TA) enzyme comprising at least one amino acid alteration of the engineered protein selected from an alteration set forth in Table 7 and combinations thereof of SEQ ID NO:1, or
(d) a transaminase comprising an amino acid sequence having at least 50% sequence identity to at least 25 or more contiguous amino acids of any of SEQ ID NO: 1, 3, 4, 5, 9, 12, 13, 26, 27, 30, 31, 38, 50, 52, 64, 74, 78, 79, 81, 91, 106, 108, and 116.

38. The engineered TA of claim 37, wherein the one or more amino acid alterations at one or more residue positions or a combination thereof of SEQ ID NO:1 is selected from a conservative or a non-conservative amino acid alteration.

39. The non-naturally occurring microbial organism of any one of claims 36-38, wherein the exogenous nucleic acid is heterologous.

40. The non-naturally occurring microbial organism of any one of claims 36-38, wherein the exogenous nucleic acid is homologous.

41. The non-naturally occurring microbial organism of any one of claims 36-40, comprising a CAR having an amino acid sequence selected from the group consisting of SEQ ID NOS:150-165, 168-171, 173-178, 180, 183-185, 187-188, 190-193, 195, 198-200, 202-216, 218-219, 221-230, 232-238, 241-244, 246-249, 251-252 and 255-264.

42. The non-naturally occurring microbial organism of any one of claims 36-40, comprising a CAR having an amino acid sequence selected from the group consisting of CAR variants 1-115 set forth in Table 9.

43. The non-naturally occurring microbial organism of any one of claims 37-42, comprising an engineered transaminase (TA) having an amino acid sequence selected from the group consisting of TA variants 1-233 set forth in Table 7.

44. The non-naturally occurring microbial organism of any one of claims 36-43, comprising a 1,6-hexanediol (HDO) pathway having a HDO pathway enzyme expressed in sufficient amounts to produce HDO, wherein said HDO pathway comprises (1) thiolase, (2) hydroxyadipyl-CoA dehydrogenase (HBD), (3) crotonase, (4) trans-enoylCoA reductase (TER), (5) 6ACA-aldehyde dehydrogenase (6ACA-ALD), (6) 6ACA-transaminase (TA), (7) carboxylic acid reductase (CAR), (8) 6-aminocaproate semialdehyde reductase, (9) 6-aminohexanol aminotransferase or oxidoreductase, and (10) 6-hydroxyhexanal reductase.

45. The non-naturally occurring microbial organism of claim 44, further comprising an exogenous nucleic acid encoding a phosphopantetheinyl transferase HDO pathway enzyme.

46. The non-naturally occurring microbial organism of any one of claims 44-45, wherein the microbial organism comprises one, two, three, four, five, six, seven, eight, nine, ten or eleven exogenous nucleic acids each encoding a HDO pathway enzyme.

47. The non-naturally occurring microbial organism of any one of claims 44-46, wherein the microbial organism comprises exogenous nucleic acids encoding each of the enzymes of the HDO pathway.

48. The non-naturally occurring microbial organism of any one of claims 44-47, wherein the at least one exogenous nucleic acid is a heterologous nucleic acid.

49. The non-naturally occurring microbial organism of any one of claims 44-48, wherein the non-naturally occurring microbial organism is in a substantially anaerobic culture medium.

50. The non-naturally occurring microbial organism of any one of claims 44-49, wherein the microbial organism is a species of bacteria, yeast, or fungus.

51. The non-naturally occurring microbial organism of any one of claims 44-50, wherein the non-naturally occurring microbial organism is capable of producing at least 10% more 6-aminocaproate semialdehyde, HDO or both compared to a control microbial organism that does not comprise the exogenous nucleic acid of any one of claims 36-43.

52. The non-naturally occurring microbial organism of any one of claims 44-51, wherein the non-naturally occurring microbial organism converts more:
(a) adipate semialdehyde to 6-aminocaproic acid, and/or
(b) 6-aminocaproic acid to 6-aminocaproate semialdehyde.
compared to a control microbial organism substantially identical to the non-naturally occurring microbial organism, with the exception that the control microbial organism does not comprise the exogenous nucleic acid of any one of claims 36-43.

53. A method for producing hexamethylenediamine (HMD), comprising culturing the non-naturally occurring microbial organism of any one of claims 27-35 under conditions and for a sufficient period of time to produce HMD.

54. The method of claim 53, wherein said method further comprises separating the HMD from other components in the culture.

55. The method of claim 54, wherein the separating comprises extraction, continuous liquid-liquid extraction, pervaporation, membrane filtration, membrane separation, reverse osmosis, electrodialysis, distillation, crystallization, centrifugation, extractive filtration, ion exchange chromatography, absorption chromatography, or ultrafiltration.

56. A method for producing 1,6-hexanediol (HDO), comprising culturing the non-naturally occurring microbial organism of any one of claims 43-52 under conditions and for a sufficient period of time to produce HMD.

57. The method of claim 56, wherein said method further comprises separating the HMD from other components in the culture.

58. The method of claim 57, wherein the separating comprises extraction, continuous liquid-liquid extraction, pervaporation, membrane filtration, membrane separation, reverse osmosis, electrodialysis, distillation, crystallization, centrifugation, extractive filtration, ion exchange chromatography, absorption chromatography, or ultrafiltration.

59. A culture medium comprising bioderived HMD, 6-aminocaproate semialdehyde, and/or HDO, wherein said bioderived HMD, 6-aminocaproate semialdehyde, and/or HDO has a carbon-12, carbon-13 and carbon-14 isotope ratio that reflects an atmospheric carbon dioxide uptake source.

60. The culture medium of claim 59, wherein the bioderived HMD, 6-aminocaproate semialdehyde, and/or HDO is produced by:
(a) the non-naturally occurring microbial organism of any one of claims 15-35;
(b) the non-naturally occurring microbial organism of any one of claims 36-52;
(c) the method of any one of claims 53-55; or
(d) the method of any one of claims 56-58.

61. The culture medium of any one of claims 59 and 61, wherein the culture medium comprises:
(a) the engineered CAR of any one of claims 1-11;
(b) the nucleic acid of any one of claims 12-14;
(c) the engineered transaminase (TA) enzyme of any one of claims 16-17, 37-38, and 43;
(d) the nucleic acid encoding the TA enzyme of any one of claims 16-17, 37-38, and 43;
(e) the engineered hexamethylenediamine (HMD) transaminase (TA2) enzyme of claim 15;
(f) the nucleic acid encoding the TA2 enzyme of claim 15;
(g) the aldehyde dehydrogenase (ALD) enzyme of any one of claims 24-27;
(h) the nucleic acid encoding the ALD enzyme of any one of claims 24-27;
(i) the non-naturally occurring microbial organism of any one of claims 15-35; or
(j) the non-naturally occurring microbial organism of any one of claims 36-52.

62. The culture medium of any one of claims 59-61, wherein said culture medium is separated from a non-naturally occurring microbial organism that produces bioderived HMD, 6-aminocaproate semialdehyde, and/or HDO.

63. Bioderived HMD, 6-aminocaproate semialdehyde, and/or HDO having a carbon-12, carbon-13 and carbon-14 isotope ratio that reflects an atmospheric carbon dioxide uptake source.

64. The bioderived HMD, 6-aminocaproate semialdehyde, and/or HDO of claim 63 is produced by:
(a) the non-naturally occurring microbial organism of any one of claims 15-35;
(b) the non-naturally occurring microbial organism of any one of claims 36-52;
(c) the method of any one of claims 53-55; or
(d) the method of any one of claims 56-58.

65. The bioderived HMD, 6-aminocaproate semialdehyde, and/or HDO of any one of claims 63-64, wherein said bioderived HMD, 6-aminocaproate semialdehyde, and/or HDO has an Fm value of at least 80%, at least 85%, at least 90%, at least 95% or at least 98%.

66. A composition comprising the bioderived HMD, 6-aminocaproate semialdehyde, and/or HDO of any one of claims 63-65, and a compound other than the bioderived HMD, 6-aminocaproate semialdehyde, and/or HDO.

67. The composition comprising the bioderived HMD, 6-aminocaproate semialdehyde, and/or HDO of claim H3, wherein the composition further comprises a portion of the non-naturally occurring microbial organism of any one of claims 15-42.

68. The composition comprising the bioderived HMD, 6-aminocaproate semialdehyde, and/or HDO of any one of claims 66-67, or a cell lysate or culture supernatant thereof.
